(19) United States
(12) Patent Application Publication
(10) Pub. No.: US 2022/0056438 A1
(43) Pub. Date: Feb. 24, 2022

(54) GENE-EDITING COMPOSITIONS AND METHODS TO MODULATE FAAH FOR TREATMENT OF NEUROLOGICAL DISORDERS

(71) Applicant: CRISPR THERAPEUTICS AG, Zug (CH)

(72) Inventors: Seshidhar Reddy Police, Cambridge, MA (US); Tony Ho, Cambridge, MA (US); Yanfei Yang, Cambridge, MA (US); Hemangi Chaudhari, Cambridge, MA (US); Anandan Paldurai, Cambridge, MA (US)

(21) Appl. No.: 17/407,690

(22) Filed: Aug. 20, 2021

Related U.S. Application Data
(63) Continuation of application No. 17/380,173, filed on Jul. 20, 2021, now abandoned.
(60) Provisional application No. 63/054,580, filed on Jul. 21, 2020.

(51) Int. Cl. C12N 15/11; C12N 15/86; A61K 38/46; A61K 31/7105; C12N 9/22

(52) U.S. Cl. CPC C12N 15/11; C12N 15/86; A61K 38/465; A61K 31/7105; C12N 2320/31; C12N 2310/20; C12N 2750/14143; C12N 2800/80; C12N 9/22

(57) ABSTRACT

The disclosure provides systems (e.g., CRISPR/Cas systems) for introducing an edit in a genomic DNA molecule comprising the fatty acid amide hydrolase gene (FAAH) and/or the FAAH pseudogene (FAAH-OUT). Also provided are methods for use of the systems, nucleic acids, delivery systems, and/or compositions described for genome editing to modulate the expression and/or activity of FAAH, for example, in a method of treating chronic pain.

[0001] The present application is a continuation of U.S. application Ser. No. 17/380,173, filed Jul. 20, 2021, and which claims the benefit of priority to U.S. Provisional Application No. 63/054,580 filed Jul. 21, 2020, the disclosures of which are incorporated herein by reference in their entireties.

### INCORPORATION OF MATERIAL SUBMITTED ELECTRONICALLY INCORPORATION BY REFERENCE OF INFORMATION SUBMITTED ELECTRONICALLY

[0002] This application contains, as a separate part of the disclosure, a Sequence Listing in computer readable form (Filename: CT138A_Seqlisting.txt; Size: 737,441 bytes; Created: Aug. 20, 2021), which is incorporated by reference in its entirety.

### BACKGROUND

[0003] Pain is a normal protective and adaptive reaction to an injury or illness and functions as a signal for damaged tissues that triggers repair processes. Pain may be caused by tissue inflammation (nociceptive) or dysfunctional nerves (neuropathic pain). Normally, pain is alleviated when the injury or illness heals or subsides. However, pain can remain sustained for long periods, even after the damaged tissues have healed. Chronic pain refers to pain that is sustained for three months or longer following the tissue injury and is a common and disabling condition. Treatment options for chronic pain, including opioids, electrical stimulation, surgery, acupuncture, and cognitive behavioral therapy, are often inadequate for effective pain management. Additionally, use of opioids to treat chronic pain is associated with serious addiction and drug-abuse liabilities. Thus, there remains an urgent need for safe and effective methods for pain treatment.

[0004] Use of cannabinoids for treatment of chronic pain are well-established. The primary bioactive constituent of cannabis is delta9-tetrahydro-cannbinol (THC). The discovery of THC led to the identification of two endogenous cannabinoid G-protein coupled receptors (GPCRs) responsible for its pharmacological actions, namely CB1 and CB2 (Goya et al (2000) EXP OPIN THER PATENTS 10:1529). These discoveries further led to identification of endogenous agonists of these receptors, or “endocannabinoids”. The first endocannabinoid identified is arachidonoylethanolamine (anandamide; AEA) (Devane, et al (1992) SCIENCE 258:1946). AEA elicits many of the pharmacological effects of exogenous cannabinoids (Piornelli et al (2003) NAT REV NEUROSCI 4:873). For example, elevated AEA levels have known effects on nociception, fear-extinction memory, anxiety, and depression (Woodhams, et al (2015) HANDB EXP PHARMACOL 227:119; Mechoulam, et al (2013) ANNU REV PSYCHOL 64:21). However, external administration of endocannabinoids has limited efficacy as they are rapidly degraded in vivo.

[0005] The major catabolic enzyme of AEA is fatty acid amide hydrolase (FAAH) (Dinh, et al (2002) PNAS 99:10819). FAAH is also the major catabolic enzyme for other bioactive fatty acid amides (FAAs), such as N-palmitoylethanolamine (PEA) (Lo Verme, et al (2005) Mol Pharmacol 67:15), oleamide (Cravatt, (1995) SCIENCE 268:1506), and N-oleoylethanolamine (OEA) (Rodrigues de Fonesca (2001) NATURE 414:209. PEA for example, is an agonist of the PPARalpha receptor and has demonstrated biological effects in animal models of inflammation (Holt et al (2005) BR J PHARMACOL 146:467).

[0006] Genetic or pharmacological inactivation of FAAH has been demonstrated to prolong and enhance the beneficial effects of AEA. For example, FAAH knockout mice have significantly elevated levels of AEA throughout the nervous system and display an analgesic phenotype (see, e.g., Huggins, et al (2012) PAIN 153:1837; Kerbrat, et al (2016) N Engl J Med 375:1717). Additionally, homozygous carriers of a hypomorphic single nucleotide polymorphism (SNP; C385A) allele in humans showed significantly lower pain sensitivity and less need for postoperative analgesia (Cajanus, et al (2016) PAIN 157:361). Knock-in mice carrying the SNP also display decreased anxiety-linked behaviors (Dincheva, et al (2015) NAT COMMUN 6:6395). Given the potential therapeutic benefits of diminishing FAAH enzymatic activity, small molecule inhibitors of FAAH have been developed. However clinical evaluation of these inhibitors for treatment of chronic pain failed due to lack of efficacy at tolerated dose levels (Huggins, et al 2012 PAIN 153:1837).

[0007] Accordingly, there remains a need for improved methods to modulate FAAH activity in vivo, thereby providing strategies to better manage pain and other neurological disorders.

### SUMMARY OF THE DISCLOSURE

[0008] In some aspects, the disclosure provides a system for introducing a deletion in a genomic DNA molecule comprising a fatty-acid amide hydrolase gene (FAAH) upstream a FAAH pseudogene (FAAH-OUT) in a cell, the system comprising: (i) a site-directed endonuclease in the form of protein, an mRNA encoding the site-directed endonuclease, or a recombinant expression vector comprising a nucleotide sequence encoding the site-directed endonuclease; (ii) a first gRNA molecule comprising a spacer sequence corresponding to a first target sequence adjacent a first PAM which is downstream of a 3′ terminus of FAAH and upstream a transcriptional start site of FAAH-OUT in the genomic DNA molecule, wherein when the first gRNA is introduced into a cell with a site-directed endonuclease that recognizes the PAM, the first gRNA combines with the site-directed endonuclease to induce cleavage proximal the first target sequence with a cleavage efficiency of at least 15%, 20%, 25%, or 30%; and (iii) a second gRNA molecule comprising a spacer sequence corresponding to a second target sequence adjacent a second PAM which is downstream of the FAAH-OUT transcriptional start site and upstream an exon 3 of FAAH-OUT in the genomic DNA molecule, wherein when the second gRNA is introduced into a cell with the site-directed endonuclease, the second gRNA combines with the site-directed endonuclease to induce cleavage proximal the second target sequence with a cleavage efficiency of at least 15%, 20%, 25%, or 30%, wherein when the system is introduced to the cell with the site-directed endonuclease, the first gRNA and second gRNA combine with the site-directed endonuclease to induce cleavage proximal the first and second target sequences, to introduce an approximately 2-10 kb deletion in the genomic DNA molecule resulting in a full or a partial removal of a FAAH-OUT promoter (FOP) and a FAAH-OUT conserved (FOC) element, thereby resulting in a reduction or elimination of FAAH mRNA expression in the cell. In some aspects, the first PAM and the second PAM are both NNGG, NGG, or NNGRRT. In some aspects, the site-directed endonuclease is a SluCas9 endonuclease or a functional derivative thereof, an mRNA encoding the SluCas9 endonuclease or functional derivative thereof, or a recombinant expression vector comprising a nucleotide sequence encoding the SluCas9 endonuclease or functional derivative thereof. In some aspects, the site-directed endonuclease is a SpCas9 polypeptide or functional derivative thereof, an mRNA encoding the SpCas9 endonuclease or functional derivative thereof, or a recombinant expression vector comprising a nucleotide sequence encoding the SpCas9 endonuclease or functional derivative thereof. In some aspects, the site-directed endonuclease is a SaCas9 polypeptide or functional derivative thereof, an mRNA encoding the SaCas9 endonuclease or functional derivative thereof, or a recombinant expression vector comprising a nucleotide sequence encoding the SaCas9 endonuclease or functional derivative thereof.

[0009] In some aspects, the disclosure provides a system for introducing a deletion in a genomic DNA molecule comprising a fatty-acid amide hydrolase gene (FAAH) upstream a FAAH pseudogene (FAAH-OUT) in a cell, the system comprising: (i) a site-directed endonuclease wherein the site-directed endonuclease is a SluCas9 endonuclease or a functional derivative thereof, an mRNA encoding the SluCas9 endonuclease or functional derivative thereof, or a recombinant expression vector comprising a nucleotide sequence encoding the SluCas9 endonuclease or functional derivative thereof; (ii) a first gRNA molecule comprising a spacer sequence corresponding to a first target sequence adjacent a first PAM which is downstream of a 3′ terminus of FAAH and upstream a transcriptional start site of FAAH-OUT in the genomic DNA molecule, wherein when the first gRNA is introduced into a cell with a site-directed endonuclease that recognizes the PAM, the first gRNA combines with the site-directed endonuclease to induce cleavage proximal the first target sequence with a cleavage efficiency of at least 15%, 20%, 25%, or 30%; and (iii) a second gRNA molecule comprising a spacer sequence corresponding to a second target sequence adjacent a second PAM which is downstream of the FAAH-OUT transcriptional start site and upstream an exon 3 of FAAH-OUT in the genomic DNA molecule, wherein when the second gRNA is introduced into a cell with the site-directed endonuclease, the second gRNA combines with the site-directed endonuclease to induce cleavage proximal the second target sequence with a cleavage efficiency of at least 15%, 20%, 25%, or 30%, wherein when the system is introduced to the cell with the site-directed endonuclease, the first gRNA and second gRNA combine with the site-directed endonuclease to induce cleavage proximal the first and second target sequences, to introduce an approximately 2-10 kb deletion in the genomic DNA molecule resulting in a full or a partial removal of a FAAH-OUT promoter (FOP) and a FAAH-OUT conserved (FOC) element, thereby resulting in a reduction or elimination of FAAH mRNA expression in the cell. In some aspects, the first PAM and the second PAM are both NNGG.

[0010] In any of the foregoing or related aspects, the deletion in the genomic DNA molecule is approximately 2-7.5 kb, approximately 2-7 kb, approximately 2-6 kb, approximately 2-5 kb, approximately 2-4 kb, approximately 3-8 kb, approximately 3-7 kb, approximately 3-6 kb, approximately 3-5 kb, approximately 4-8 kb, approximately 4-7 kb, approximately 4-6 kb, approximately 5-8 kb, or approximately 5-7 kb. In some aspects, the first target sequence is (i) within a region of the genomic DNA molecule that is at least about 5 kb, about 5.5 kb, about 6 kb, about 6.5 kb, about 7 kb, about 7.5 kb, about 8 kb, about 8.5 kb, about 9 kb, or about 9.5 kb downstream the 3′ terminus of FAAH; (ii) within a region of the genomic DNA molecule that is at least about 200 bp, about 300 bp, about 400 bp, about 500 bp, about 600 bp, about 700 bp, about 800 bp, about 900 bp, about 1 kb, about 2 kb, about 3 kb, or about 4 kb upstream the transcriptional start site of FAAH-OUT; (iii) within a region of the genomic DNA molecule between about 46,418,846 to about 46,422,883 of chromosome 1, according to human reference genome Hg38; or (iv) a combination of (i)-(iii). In some aspects, the second target sequence is (i) within a region of the genomic DNA molecule that is about 1.8 kb, about 1.9 kb, about 2 kb, about 2.1 kb, about 2.2 kb, about 2.3 kb, about 2.4 kb, about 2.5 kb, about 2.6 kb, about 2.7 kb, about 2.8 kb, about 2.9 kb, about 3 kb, about 3.1 kb, about 3.2 kb, or about 3.3 kb downstream the transcriptional start site of FAAH-OUT; (ii) within a region of the genomic DNA molecule that is about 5.8 kb, about 5.9 kb, about 6 kb, about 6.1 kb, about 6.2 kb, about 6.3 kb, about 6.4 kb, about 6.5 kb, about 6.6 kb, about 6.7 kb, about 6.8 kb, about 6.9 kb, about 7 kb, about 7.1 kb, about 7.2 kb, or about 7.3 kb upstream the 5′ end of exon 3 of FAAH-OUT; (iii) within a region of the genomic DNA molecule between about 46,424,697 to about 46,426,377 of chromosome 1, according to human reference genome Hg38; or (iv) a combination of (i)-(iii).

[0011] In any of the foregoing or related aspects, the deletion in the genomic DNA molecule is approximately 5 kb, approximately 5.5 kb, approximately 6 kb, approximately 6.5 kb, approximately 7 kb, approximately 7.5 kb, or approximately 8 kb. In some aspects, the deletion results in removal of FOP. In some aspects, the first spacer sequence comprises: a nucleotide sequence having up to 1, 2, or 3 nucleotide deletions or substitutions relative to SEQ ID NO: 750 or SEQ ID NO: 765. In some aspects, the deletion results in removal of FOC. In some aspects, the second spacer sequence comprises: a nucleotide sequence having up to 1, 2, or 3 nucleotide deletions or substitutions relative to any one of SEQ ID NOs: 878, 888, 891, 895, 898, and 909. In some aspects, the second spacer sequence comprises a nucleotide sequence set forth in SEQ ID NO: 878, 888, 891, 895, 898, or 909. In some aspects, the deletion results in a partial removal of FOC. In some aspects, the second spacer sequence comprises: a nucleotide sequence having up to 1, 2 or 3 nucleotide deletions or substitutions relative to any one of SEQ ID NOs: 815, 816, 830, and 862. In some aspects, the second spacer sequence comprises a nucleotide sequence set forth in SEQ ID NO: 815, 816, 830, or 862.

[0012] In any of the foregoing or related aspects, the deletion in the genomic DNA molecule is approximately 2 kb, approximately 2.5 kb, approximately 3 kb, approximately 3.5 kb, approximately 4 kb, approximately 4.5 kb, approximately 5 kb, or approximately 5.5 kb. In some aspects, the deletion results in a partial removal of FOP. In some aspects, the first spacer sequence comprises: a nucleotide sequence having up to 1, 2, or 3 nucleotide deletions or substitutions relative to SEQ ID NO: 801 or SEQ ID NO: 807. In some aspects, the first spacer sequence comprises a nucleotide sequence set forth in SEQ ID NO: 801 or 807. In some aspects, the deletion results in removal of FOC. In some aspects, the second spacer sequence comprises: a nucleotide sequence having up to 1, 2 or 3 nucleotide deletions or substitutions relative to any one of SEQ ID NOs: 878, 888, 891, 895, 898, and 909. In some aspects, the second spacer sequence comprises a nucleotide sequence set forth in SEQ ID NO: 878, 888, 891, 895, 898, and 909. In some aspects, the deletion results in a partial removal of FOC. In some aspects, the second spacer sequence comprises: a nucleotide sequence having up to 1, 2 or 3 nucleotide deletions or substitutions relative to any one of SEQ ID NOs: 815, 816, 830, and 862. In some aspects, the second spacer comprises a nucleotide sequence comprises SEQ ID NO: 815, 816, 830, or 862.

[0013] In some aspects, the disclosure provides a system for introducing a deletion in a genomic DNA molecule comprising a fatty-acid amide hydrolase gene (FAAH) upstream a FAAH pseudogene (FAAH-OUT) in a cell, the system comprising: (i) a site-directed endonuclease wherein the site-directed endonuclease is a SpCas9 polypeptide or functional derivative thereof, an mRNA encoding the SpCas9 endonuclease or functional derivative thereof, or a recombinant expression vector comprising a nucleotide sequence encoding the SpCas9 endonuclease or functional derivative thereof; (ii) a first gRNA molecule comprising a spacer sequence corresponding to a first target sequence adjacent a first PAM which is downstream of a 3′ terminus of FAAH and upstream a transcriptional start site of FAAH-OUT in the genomic DNA molecule, wherein when the first gRNA is introduced into a cell with a site-directed endonuclease that recognizes the PAM, the first gRNA combines with the site-directed endonuclease to induce cleavage proximal the first target sequence with a cleavage efficiency of at least 15%, 20%, 25%, or 30%; and (iii) a second gRNA molecule comprising a spacer sequence corresponding to a second target sequence adjacent a second PAM which is downstream of the FAAH-OUT transcriptional start site and upstream an exon 3 of FAAH-OUT in the genomic DNA molecule, wherein when the second gRNA is introduced into a cell with the site-directed endonuclease, the second gRNA combines with the site-directed endonuclease to induce cleavage proximal the second target sequence with a cleavage efficiency of at least 15%, 20%, 25%, or 30%, wherein when the system is introduced to the cell with the site-directed endonuclease, the first gRNA and second gRNA combine with the site-directed endonuclease to induce cleavage proximal the first and second target sequences, to introduce an approximately 2-10 kb deletion in the genomic DNA molecule resulting in a full or a partial removal of a FAAH-OUT promoter (FOP) and a FAAH-OUT conserved (FOC) element, thereby resulting in a reduction or elimination of FAAH mRNA expression in the cell. In some aspects, the first PAM and the second PAM are both NGG. In some aspects, the deletion results in full removal of FOP.

[0014] In any of the foregoing or related aspects, the deletion in the genomic DNA molecule is approximately 3-9 kb, approximately 3-8 kb, approximately 3-7 kb, approximately 3-6 kb, approximately 3-5 kb, approximately 4-10 kb, approximately 4-9 kb, approximately 4-8 kb, approximately 4-7 kb, approximately 4-6 kb, approximately 5-10 kb, approximately 5-9 kb, approximately 5-8 kb, approximately 5-7 kb, approximately 6-10 kb, approximately 6-9 kb, approximately 6-8 kb, or approximately 8-10 kb. In some aspects, the first target sequence is (i) within a region of the genomic DNA molecule that is at least about 4.5 kb, about 5 kb, about 5.5 kb, about 6 kb, about 6.5 kb, about 7 kb, about 7.5 kb, about 7.5 kb, or about 8 kb downstream the 3′ terminus of FAAH; (ii) within a region of the genomic DNA molecule that is at least about 1.5 kb, about 2 kb, about 2.5 kb, about 3 kb, about 3.5, about 4 kb, about 4.5 kb, or about 5 kb upstream the transcriptional start site of FAAH-OUT; (iii) within a region of the genomic DNA molecule between about 46,418,391 to about 46,421,122 of chromosome 1, according to human reference genome Hg38; or (iv) a combination of (i)-(iii). In some aspects, the second target sequence is (i) within a region of the genomic DNA molecule that is at least about 1.8 kb, about 1.9 kb, about 2 kb, about 2.5 kb, about 3 kb, about 3.5 kb, about 4 kb, about 4.5 kb, about 5 kb, or about 5.5 kb downstream the transcriptional start site of FAAH-OUT; (ii) within a region of the genomic DNA molecule that is at least about 3.5 k, about 4 kb, about 4.5 kb, about 5 kb, about 5.5 kb, about 6 kb, about 6.5 kb, about 7 kb, or about 7.5 kb upstream the 5′ end of exon 3 of FAAH-OUT; (iii) within a region of the genomic DNA molecule between about 46,424,651 to about 46,428,274 of chromosome 1, according to human reference genome Hg38; or (iv) a combination of (i)-(iii).

[0015] In any of the foregoing or related aspects, the deletion in the genomic DNA molecule is approximately 8 kb, approximately 8.5 kb, approximately 9 kb, approximately 9.5 kb, or approximately 10 kb. In some aspects, the deletion results in full removal of FOC. In some aspects, the first spacer sequence comprises: a nucleotide sequence having 1, 2, or 3 nucleotide deletions or substitutions relative to any one of SEQ ID NOs: 374, 378, and 406; and wherein the second spacer sequence comprises: a nucleotide sequence having 1, 2, or 3 nucleotide deletions or substitutions relative to SEQ ID NO: 550.

[0016] In any of the foregoing or related aspects, the deletion in the genomic DNA molecule is approximately 5 kb, approximately 5.5 kb, approximately 6 kb, approximately 6.5 kb, approximately 7 kb, approximately 7.5 kb, or approximately 8 kb. In some aspects, the deletion results in full removal of FOC. In some aspects, the first spacer sequence comprises: a nucleotide sequence having 1, 2, or 3 nucleotide deletions or substitutions relative to any one of SEQ ID NOs: 374, 378, and 406; and wherein the second spacer sequence comprises: a nucleotide sequence having 1, 2, or 3 nucleotide deletions or substitutions relative to any one of SEQ ID NOs: 533, 534, 538, and 540. In some aspects, the second spacer sequence comprises a nucleotide sequence set forth in SEQ ID NO: 533, 534, 538, and 540. In some aspects, the first spacer sequence comprises: a nucleotide sequence having 1, 2, or 3 nucleotide deletions or substitutions relative to SEQ ID NO: 421; and wherein the second spacer sequence comprises: a nucleotide sequence having 1, 2, or 3 nucleotide deletions or substitutions relative to SEQ ID NO: 550. In some aspects, the first spacer sequence comprises: a nucleotide sequence set forth in SEQ ID NO: 421; and wherein the second spacer sequence comprises: a nucleotide sequence set forth in SEQ ID NO: 550. In some aspects, the deletion results in partial removal of FOC. In some aspects, the first spacer sequence comprises: a nucleotide sequence having 1, 2, or 3 nucleotide deletions or substitutions relative to any one of SEQ ID NOs: 374, 378, and 406; and wherein the second spacer sequence comprises: a nucleotide sequence having 1, 2 or 3 nucleotide deletions or substitutions relative to any one of SEQ ID NOs: 475, 487, 491, and 502. In some aspects, the first spacer sequence comprises: a nucleotide sequence set forth in SEQ ID NOs: 374, 378, or 406; and wherein the second spacer sequence comprises: a nucleotide sequence set forth in SEQ ID NOs: 475, 487, 491, and 502.

[0017] In any of the foregoing or related aspects, the deletion in the genomic DNA molecule is approximately 3 kb, approximately 3.5 kb, approximately 4 kb, approximately 4.5 kb, approximately 5 kb, or approximately 5.5 kb. In some aspects, the first spacer sequence comprises: a nucleotide sequence having 1, 2, or 3 nucleotide deletions or substitutions relative to SEQ ID NO: 421. In some aspects, the deletion results in full removal of FOC. In some aspects, the second spacer sequence comprises: a nucleotide sequence having 1, 2 or 3 nucleotide deletions or substitutions relative to any one of SEQ ID NOs: 533, 534, 538, and 540. In some aspects, the second spacer comprises a nucleotide sequence set forth in SEQ ID NO: 533, 534, 538, and 540. In some aspects, the deletion results in partial removal of FOC. In some aspects, the second spacer sequence comprises: a nucleotide sequence having 1, 2 or 3 nucleotide deletions or substitutions relative to any one of SEQ ID NOs: 475, 487, 491, and 502. In some aspects, the second spacer sequence comprises a nucleotide sequence set forth in SEQ ID NO: 475, 487, 491, and 502.

[0018] In some aspects, the disclosure provides a system for introducing a deletion in a genomic DNA molecule comprising a fatty-acid amide hydrolase gene (FAAH) upstream a FAAH pseudogene (FAAH-OUT) in a cell, the system comprising: (i) a site-directed endonuclease wherein the site-directed endonuclease is a SaCas9 polypeptide or functional derivative thereof, an mRNA encoding the SaCas9 endonuclease or functional derivative thereof, or a recombinant expression vector comprising a nucleotide sequence encoding the SaCas9 endonuclease or functional derivative thereof; (ii) a first gRNA molecule comprising a spacer sequence corresponding to a first target sequence adjacent a first PAM which is downstream of a 3′ terminus of FAAH and upstream a transcriptional start site of FAAH-OUT in the genomic DNA molecule, wherein when the first gRNA is introduced into a cell with a site-directed endonuclease that recognizes the PAM, the first gRNA combines with the site-directed endonuclease to induce cleavage proximal the first target sequence with a cleavage efficiency of at least 15%, 20%, 25%, or 30%; and (iii) a second gRNA molecule comprising a spacer sequence corresponding to a second target sequence adjacent a second PAM which is downstream of the FAAH-OUT transcriptional start site and upstream an exon 3 of FAAH-OUT in the genomic DNA molecule, wherein when the second gRNA is introduced into a cell with the site-directed endonuclease, the second gRNA combines with the site-directed endonuclease to induce cleavage proximal the second target sequence with a cleavage efficiency of at least 15%, 20%, 25%, or 30%, wherein when the system is introduced to the cell with the site-directed endonuclease, the first gRNA and second gRNA combine with the site-directed endonuclease to induce cleavage proximal the first and second target sequences, to introduce an approximately 2-10 kb deletion in the genomic DNA molecule resulting in a full or a partial removal of a FAAH-OUT promoter (FOP) and a FAAH-OUT conserved (FOC) element, thereby resulting in a reduction or elimination of FAAH mRNA expression in the cell. In some aspects, the first PAM and the second PAM are both NNGRRT. In some aspects, the deletion results in full removal of FOP.

[0019] In any of the foregoing or related aspects, the deletion in the genomic DNA molecule is at least about approximately 3-9 kb, approximately 3-8 kb, approximately 3-7 kb, approximately 3-6 kb, approximately 3-5 kb, approximately 4-10 kb, approximately 4-9 kb, approximately 4-8 kb, approximately 4-7 kb, approximately 4-6 kb, approximately 5-10 kb, approximately 5-9 kb, approximately 5-8 kb, approximately 5-7 kb, approximately 6-10 kb, approximately 6-9 kb, approximately 6-8 kb, or approximately 8-10 kb. In some aspects, the first target sequence is (i) within a region of the genomic DNA molecule that is at least about 4.5 kb, about 5 kb, about 5.5 kb, about 6 kb, about 6.5 kb, about 7 kb, about 7.5 kb, about 8 kb, about 8.5 kb, or about 9 kb downstream the 3′ terminus of FAAH; (ii) within a region of the genomic DNA molecule that is at least about 0.8 kb, about 0.9 kb, about 1 kb, about 1.5 kb, about 2 kb, about 2.5 kb, about 3 kb, about 3.5, about 4 kb, about 4.5 kb, or about 5 kb upstream the transcriptional start site of FAAH-OUT; (iii) within a region of the genomic DNA molecule between about 46,418,168 to about 46,422,208 of chromosome 1, according to human reference genome Hg38; or (iv) a combination of (i)-(iii). In some aspects, the second target sequence is (i) within a region of the genomic DNA molecule that is at least about 1.5 kb, about 2 kb, about 2.5 kb, about 3 kb, about 3.5 kb, about 4 kb, about 4.5 kb, about 5 kb, or about 5.5 kb downstream the transcriptional start site of FAAH-OUT; (ii) within a region of the genomic DNA molecule that is at least about 3.5 kb, about 4 kb, about 4.5 kb, about 5 kb, about 5.5 kb, about 6 kb, about 6.5 kb, about 7 kb, or about 7.5 kb upstream the 5′ end of exon 3 of FAAH-OUT; (iii) within a region of the genomic DNA molecule between about 46,424,887 to about 46,428,508 of chromosome 1, according to human reference genome Hg38; or (iv) a combination of (i)-(iii).

[0020] In any of the foregoing or related aspects, the deletion in the genomic DNA molecule is at least about approximately 8 kb, approximately 8.5 kb, approximately 9 kb, approximately 9.5 kb, or approximately 10 kb. In some aspects, the deletion results in removal of FOC. In some aspects, the first spacer sequence comprises: a nucleotide sequence having 1, 2, or 3 nucleotide deletions or substitutions relative to any one of SEQ ID NOs: 1102, 1104, 1111, and 1114; and wherein the second spacer sequence comprises: a nucleotide sequence having 1, 2, or 3 nucleotide deletions or substitutions relative to SEQ ID NO: 1259 or SEQ ID NO: 1264. In some aspects, the first spacer sequence comprises: a nucleotide sequence set forth in SEQ ID NOs: 1102, 1104, 1111, or 1114; and wherein the second spacer sequence comprises: a nucleotide sequence set forth in SEQ ID NO: 1259 or SEQ ID NO: 1264.

[0021] In any of the foregoing or related aspects, the deletion in the genomic DNA molecule is approximately 5 kb, approximately 5.5 kb, approximately 6 kb, approximately 6.5 kb, approximately 7 kb, approximately 7.5 kb, or approximately 8 kb. In some aspects, the deletion results in full removal of FOC. In some aspects, the first spacer sequence comprises: a nucleotide sequence having 1, 2, or 3 nucleotide deletions or substitutions relative to any one of SEQ ID NOs: 1102, 1104, 1111, 1114, 1119, 1121, and 1128; and wherein the second spacer sequence comprises: a nucleotide sequence having 1, 2, or 3 nucleotide deletions or substitutions relative to any one of SEQ ID NO: 1245. In some aspects, the first spacer sequence comprises: a nucleotide sequence set forth in SEQ ID NO: 1102, 1104, 1111, 1114, 1119, 1121, or 1128; and wherein the second spacer sequence comprises: a nucleotide sequence set forth in SEQ ID NO: 1245. In some aspects, the first spacer sequence comprises: a nucleotide sequence having 1, 2, or 3 nucleotide deletions or substitutions relative to any one of SEQ ID NOs: 1119, 1121, 1128, 1132, 1139, 1140, 1148, and 1152; and wherein the second spacer sequence comprises: a nucleotide sequence having 1, 2, or 3 nucleotide deletions or substitutions relative to any one of SEQ ID NO: 1259 or SEQ ID NO: 1264. In some aspects, the first spacer sequence comprises: a nucleotide sequence set forth in SEQ ID NOs: 1119, 1121, 1128, 1132, 1139, 1140, 1148, or 152; and wherein the second spacer sequence comprises: a nucleotide sequence set forth in SEQ ID NO: 1259 or SEQ ID NO: 1264. In some aspects, the deletion results in partial removal of FOC. In some aspects, the first spacer sequence comprises: a nucleotide sequence having 1, 2, or 3 nucleotide deletions or substitutions relative to any one of SEQ ID NOs: 1102, 1104, and 1111; and wherein the second spacer sequence comprises: a nucleotide sequence having 1, 2 or 3 nucleotide deletions or substitutions relative to any one of SEQ ID NO: 1218. In some aspects, the first spacer sequence comprises: a nucleotide sequence set forth in SEQ ID NOs: 1102, 1104, or 1111; and wherein the second spacer sequence comprises: a nucleotide sequence set forth in SEQ ID NO: 1218.

[0022] In any of the foregoing or related aspects, the deletion in the genomic DNA molecule is approximately 3 kb, approximately 3.5 kb, approximately 4 kb, approximately 4.5 kb, approximately 5 kb, or approximately 5.5 kb. In some aspects, the deletion results in full removal of FOC. In some aspects, the first spacer sequence comprises: a nucleotide sequence having 1, 2, or 3 nucleotide deletions or substitutions relative to any one of SEQ ID NOs: 1132, 1139, 1140, 1148, and 1152; and wherein the second spacer sequence comprises: a nucleotide sequence having 1, 2, or 3 nucleotide deletions or substitutions relative to SEQ ID NO: 1245. In some aspects, the first spacer sequence comprises: a nucleotide sequence set forth in SEQ ID NOs: 1132, 1139, 1140, 1148, or 1152; and wherein the second spacer sequence comprises: a nucleotide sequence set forth in SEQ ID NO: 1245. In some aspects, the deletion results in partial removal of FOC. In some aspects, the first spacer sequence comprises: a nucleotide sequence having 1, 2, or 3 nucleotide deletions or substitutions relative to any one of SEQ ID NOs: 1114, 1119, 1121, 1128, 1132, 1139, 1140, 1148, and 1152; and wherein the second spacer sequence comprises: a nucleotide sequence having 1, 2 or 3 nucleotide deletions or substitutions relative to SEQ ID NO: 1218. In some aspects, the first spacer sequence comprises: a nucleotide sequence set forth in SEQ ID NOs: 1114, 1119, 1121, 1128, 1132, 1139, 1140, 1148, or 1152; and wherein the second spacer sequence comprises: a nucleotide sequence set forth in SEQ ID NO: 1218.

[0023] In some aspects, the disclosure provides a system for use with a site-directed endonuclease to introduce a deletion in a genomic DNA molecule comprising a fatty-acid amide hydrolase gene (FAAH) upstream a FAAH pseudogene (FAAH-OUT) in a cell, the system comprising: (i) a first gRNA molecule targeting a target site in the genomic DNA molecule, the first gRNA comprising a spacer sequence corresponding to a first target sequence consisting of a nucleotide sequence selected from any one of SEQ ID NOs: 564, 579, 615, and 621; and (ii) a second gRNA molecule targeting a target site in the genomic DNA molecule, the second gRNA comprising a spacer sequence corresponding to a second target sequence consisting of a nucleotide sequence selected from any one of SEQ ID NOs: 629, 630, 644, 676, 692, 702, 705, 709, 712, and 723. In some aspects, the system comprises a site directed endonuclease which recognizes a PAM NNGG. In some aspects, the site-directed endonuclease is a SluCas9 endonuclease or a functional derivative thereof, an mRNA encoding the SluCas9 endonuclease or functional derivative thereof, or a recombinant expression vector comprising a nucleotide sequence encoding the SluCas9 endonuclease or functional derivative thereof. In some aspects, the first target sequence and second target sequences are selected from: (i) the nucleotide sequence of SEQ ID NO: 564 and the nucleotide sequence of SEQ ID NO: 629, 630, 644, 676, 692, 702, 705, 709, 712, or 723; (ii) the nucleotide sequence of SEQ ID NO: 579 and the nucleotide sequence of SEQ ID NO: 629, 630, 644, 676, 692, 702, 705, 709, 712, or 723; (ii) the nucleotide sequence of SEQ ID NO: 615 and the nucleotide sequence of SEQ ID NO: 629, 630, 644, 676, 692, 702, 705, 709, 712, 723; and (iv) the nucleotide sequence of SEQ ID NO: 621 and the nucleotide sequence of SEQ ID NO: 629, 630, 644, 676, 692, 702, 705, 709, 712, 723.

[0024] In some aspects, the disclosure provides a system for use with a site-directed endonuclease to introduce a deletion in a genomic DNA molecule comprising a fatty-acid amide hydrolase gene (FAAH) upstream a FAAH pseudogene (FAAH-OUT) in a cell, the system comprising: (i) a first gRNA molecule targeting a target site in the genomic DNA molecule, the first gRNA comprising a first spacer sequence comprising a nucleotide sequence selected from any one of SEQ ID NOs: 750, 765, 801, and 807; and (ii) a second gRNA molecule targeting a target site in the genomic DNA molecule, the second gRNA comprising a second spacer sequence comprising a nucleotide sequence selected from any one of SEQ ID NOs: 815, 816, 830, 862, 878, 888, 891, 895, 898, and 909. In some aspects, the system comprises a site directed endonuclease which recognizes a PAM NNGG. In some aspects, the site-directed endonuclease is a SluCas9 endonuclease or a functional derivative thereof, an mRNA encoding the SluCas9 endonuclease or functional derivative thereof, or a recombinant expression vector comprising a nucleotide sequence encoding the SluCas9 endonuclease or functional derivative thereof. In some aspects, the first and second spacer sequences are selected from: (i) the nucleotide sequence of SEQ ID NO: 750 and the nucleotide sequence of SEQ ID NO: 815, 816, 830, 862, 888, 891, 895, 898, or 909; (ii) the nucleotide sequence of SEQ ID NO: 765 and the nucleotide sequence of SEQ ID NO: 815, 816, 830, 862, 888, 891, 895, 898, or 909; (iii) the nucleotide sequence of SEQ ID NO: 801 and the nucleotide sequence of SEQ ID NO: 815, 816, 830, 862, 888, 891, 895, 898, or 909; and (iv) the nucleotide sequence of SEQ ID NO: 807 and the nucleotide sequence of SEQ ID NO: 815, 816, 830, 862, 888, 891, 895, 898, or 909.

[0025] In some aspects, the disclosure provides a system for use with a site-directed endonuclease to introduce a deletion in a genomic DNA molecule comprising a fatty-acid amide hydrolase gene (FAAH) upstream a FAAH pseudogene (FAAH-OUT) in a cell, the system comprising: (i) a first gRNA molecule targeting a target site in the genomic DNA molecule, the first gRNA comprising a spacer sequence corresponding to a first target sequence consisting of a nucleotide sequence selected from any one of SEQ ID NOs: 189, 193, 221, and 236; and (ii) a second gRNA molecule targeting a target site in the genomic DNA molecule, the second gRNA comprising a spacer sequence corresponding to a second target sequence consisting of a nucleotide sequence selected from SEQ ID NO: 290, 302, 306, 317, 348, 349, 353, 355, and 365. In some aspects, the system comprises a site directed endonuclease which recognizes a PAM NGG. In some aspects, the site-directed endonuclease is a SpCas9 endonuclease or a functional derivative thereof, an mRNA encoding the SpCas9 endonuclease or functional derivative thereof, or a recombinant expression vector comprising a nucleotide sequence encoding the SpCas9 endonuclease or functional derivative thereof. In some aspects, the first and second target sequences are selected from (i) the nucleotide sequence of SEQ ID NO: 189 and the nucleotide sequence of SEQ ID NO: 290, 302, 306, 317, 348, 349, 353, 355, or 365; (ii) the nucleotide sequence of SEQ ID NO: 193 and the nucleotide sequence of SEQ ID NO: 290, 302, 306, 317, 348, 349, 353, or 355; (iii) the nucleotide sequence of SEQ ID NO: 221 and the nucleotide sequence of SEQ ID NO: 290, 302, 306, 317, 348, 349, 353, or 355; and (iv) the nucleotide sequence of SEQ ID NO: 236 and the nucleotide sequence of SEQ ID NO: 290, 302, 306, 348, 349, or 355.

[0026] In some aspects, the disclosure provides a system for use with a site-directed endonuclease to introduce a deletion in a genomic DNA molecule comprising a fatty-acid amide hydrolase gene (FAAH) upstream a FAAH pseudogene (FAAH-OUT) in a cell, the system comprising: (i) a first gRNA molecule targeting a target site in the genomic DNA molecule, the first gRNA comprising a first spacer sequence selected from any one of SEQ ID NOs: 374, 378, 406, and 421; and (ii) a second gRNA molecule targeting a target site in the genomic DNA molecule, the second gRNA comprising a second spacer sequence selected from any one of SEQ ID NOs: 475, 487, 491, 502, 533, 534, 538, 540 and 550. In some aspects, the system comprises a site directed endonuclease which recognizes a PAM NGG. In some aspects, the site-directed endonuclease is a SpCas9 endonuclease or a functional derivative thereof, an mRNA encoding the SpCas9 endonuclease or functional derivative thereof, or a recombinant expression vector comprising a nucleotide sequence encoding the SpCas9 endonuclease or functional derivative thereof. In some aspects, the first and second spacer sequences are selected from: (i) the nucleotide sequence of SEQ ID NO: 374 and the nucleotide sequence of SEQ ID NO: 475, 487, 491, 502, 533, 534, 538, 540, or 550; (ii) the nucleotide sequence of SEQ ID NO: 378 and the nucleotide sequence of SEQ ID NO: 475, 487, 491, 502, 533, 534, 538, or 540; (iii) the nucleotide sequence of SEQ ID NO: 406 and the nucleotide sequence of SEQ ID NO: 475, 487, 491, 502, 533, 534, 538, or 540; and (iv) the nucleotide sequence of SEQ ID NO: 421 and the nucleotide sequence of SEQ ID NO: 475, 491, 533, 534, or 540.

[0027] In some aspects, the disclosure provides a system for use with a site-directed endonuclease to introduce a deletion in a genomic DNA molecule comprising a fatty-acid amide hydrolase gene (FAAH) upstream a FAAH pseudogene (FAAH-OUT) in a cell, the system comprising: (i) a first gRNA molecule targeting a target site in the genomic DNA molecule, the first gRNA comprising a spacer sequence corresponding to a first target sequence consisting of a nucleotide sequence selected from any one of SEQ ID NOs: 930, 932, 939, 942, 947, 949, 956, 960, 967, 968, 976, and 980; and (ii) a second gRNA molecule targeting a target site in the genomic DNA molecule, the second gRNA comprising a spacer sequence corresponding to a second target sequence consisting of a nucleotide sequence selected from any one of SEQ ID NOs: 1046, 1073, 1087, and 1092. In some aspects, the system comprises a site directed endonuclease which recognizes a PAM NNGRRT. In some aspects, the site-directed endonuclease is a SaCas9 endonuclease or a functional derivative thereof, an mRNA encoding the SaCas9 endonuclease or functional derivative thereof, or a recombinant expression vector comprising a nucleotide sequence encoding the SaCas9 endonuclease or functional derivative thereof. In some aspects, the first and second target sequences are selected from (i) the nucleotide sequence of SEQ ID NO: 930, 932, 939, 942, 947, 949, 956, 960, 967, 968, 976, or 980 and the nucleotide sequence of SEQ ID NO: 1046; (ii) the nucleotide sequence of SEQ ID NO: 930, 932, 939, 942, 947, 949, 956, 960, 967, 968, 976, or 980 and the nucleotide sequence of SEQ ID NO: 1073; (iii) the nucleotide sequence of SEQ ID NO: 930, 932, 939, 942, 947, 949, 956, 960, 967, 968, 976, or 980 and the nucleotide sequence of SEQ ID NO: 1087; and (iv) the nucleotide sequence of SEQ ID NO: 930, 956, 960, 967, 968, 976, or 980 and the nucleotide sequence of SEQ ID NO: 1092.

[0028] In some aspects, the disclosure provides a system for use with a site-directed endonuclease to introduce a deletion in a genomic DNA molecule comprising a fatty-acid amide hydrolase gene (FAAH) upstream a FAAH pseudogene (FAAH-OUT) in a cell, the system comprising: (i) a first gRNA molecule targeting a target site in the genomic DNA molecule, the first gRNA comprising a first spacer sequence comprising a nucleotide sequence selected from any one of SEQ ID NOs: 1102, 1104, 1111, 1114, 1119, 1121, 1128, 1132, 1139, 1140, 1148, and 1152; and (ii) a second gRNA molecule targeting a target site in the genomic DNA molecule, the second gRNA comprising a second spacer sequence comprising a nucleotide sequence selected from any one of SEQ ID NOs: 1218, 1245, 1259, and 1264. In some aspects, the system comprises a site directed endonuclease which recognizes a PAM NNGRRT. In some aspects, the site-directed endonuclease is a SaCas9 endonuclease or a functional derivative thereof, an mRNA encoding the SaCas9 endonuclease or functional derivative thereof, or a recombinant expression vector comprising a nucleotide sequence encoding the SaCas9 endonuclease or functional derivative thereof. In some aspects, the first and second spacer sequences are selected from (i) the nucleotide sequence of SEQ ID NO: 1102, 1104, 1111, 1119, 1121, 1128, 1132, 1139, 1140, 1148, or 1152 and the nucleotide sequence of SEQ ID NO: 1218; (ii) the nucleotide sequence of SEQ ID NO: 1102, 1104, 1111, 1119, 1121, 1128, 1132, 1139, 1140, 1148, or 1152 and the nucleotide sequence of SEQ ID NO: 1245; (iii) the nucleotide sequence of SEQ ID NO: 1102, 1104, 1111, 1119, 1121, 1128, 1132, 1139, 1140, 1148, or 1152 and the nucleotide sequence of SEQ ID NO: 1259; and (iv) the nucleotide sequence of SEQ ID NO: 1102, 1128, 1132, 1139, 1140, 1148, or 1152 and the nucleotide sequence of SEQ ID NO: 1264.

[0029] In any of the foregoing or related aspects, the deletion results in: (i) a genomic DNA molecule deficient in a transcriptional regulatory element that enables or promotes FAAH-OUT expression; (ii) a genomic DNA molecule with reduced rate of transcription of FAAH mRNA; (iii) a reduced amount of FAAH mRNA transcript; (iv) an increased rate of degradation of FAAH mRNA transcript; (v) a reduced amount of FAAH polypeptide product; or (vi) any combination of (i)-(v).

[0030] In any of the foregoing or related aspects, wherein the system is introduced to a population of cells comprising the genomic DNA molecule, the system results in a proportion of edited cells comprising the deletion that is at least about 20%, about 25%, about 30%, about 35%, about 40%, about 45%, or about 50% of the total population of cells. In some aspects, the system results in (i) a reduction of FAAH-OUT mRNA expression by at least about 15%, about 20%, about 25%, about 30%, about 35%, about 40%, about 45%, or about 50% relative to a population of unmodified cells; (ii) a reduction of FAAH mRNA expression by at least about 15%, about 20%, about 25%, about 30%, about 35%, about 40%, about 45%, or about 50% relative to a population of unmodified cells; (iii) a reduction of FAAH polypeptide by at least about 15%, about 20%, about 25%, about 30%, about 35%, about 40%, about 45%, or about 50% relative to a population of unmodified cells; or (iv) a combination of (i)-(iii).

[0031] In any of the foregoing or related aspects, the system comprises a recombinant expression vector comprising a nucleotide sequence encoding the site directed endonuclease. In some aspects, the system comprises a recombinant expression vector comprising (i) a nucleotide sequence encoding the site directed endonuclease, and (ii) a nucleotide sequence encoding the first gRNA, a nucleotide sequence encoding the second gRNA, or both. In some aspects, the system comprises a first recombinant expression vector comprising a nucleotide sequence encoding the site-directed endonuclease, and a second recombinant expression vector comprising a nucleotide sequence encoding the first gRNA, a nucleotide sequence encoding the second gRNA, or both. In some aspects, the vector is a viral vector. In some aspects, the vector is an AAV vector. In some aspects, the first gRNA, the second gRNA, and the site-directed endonuclease are individually formulated or co-formulated in a lipid nanoparticle. In some aspects, the system comprises the mRNA encoding the site-directed endonuclease. In some aspects, the system comprises the site-directed endonuclease. In some aspects, the system comprises: (i) a ribonucleoprotein complex of the first gRNA and the site-directed endonuclease; (ii) a ribonucleoprotein complex of the second gRNA and the site-directed endonuclease; or (iii) a ribonucleoprotein complex of the first gRNA, the second gRNA, and the site-directed endonuclease. In some aspects, the first gRNA, the second gRNA, and the site-directed nuclease are individually formulated or co-formulated in a lipid nanoparticle.

[0032] In some aspects, the disclosure provides a nucleic acid molecule comprising a nucleotide sequence encoding one or more gRNA molecules targeting a target site in a genomic DNA molecule comprising a fatty-acid amide hydrolase gene (FAAH) upstream a FAAH pseudogene (FAAH-OUT) in a cell, the gRNA(s) selected from: (i) a gRNA comprising a spacer sequence corresponding to a target sequence consisting of a nucleotide sequence selected from any one of SEQ ID NOs: 564, 579, 615, and 621; (ii) a gRNA comprising a spacer sequence corresponding to a target sequence consisting of a nucleotide sequence selected from any one of SEQ ID NOs: 629, 630, 644, 676, 692, 702, 705, 709, 712, and 723; (iii) a gRNA molecule comprising a spacer sequence comprising a nucleotide sequence selected from any one of SEQ ID NOs: 750, 765, 801, and 807; (iv) a gRNA molecule comprising a spacer sequence comprising a nucleotide sequence selected from any one of SEQ ID NOs: 815, 816, 830, 862, 878, 888, 891, 895, 898, and 909; (v) a combination of a gRNA of (i) and a gRNA of (ii); and (vi) a combination of a gRNA of (iii) and a gRNA of (iv).

[0033] In some aspects, the disclosure provides a nucleic acid molecule comprising a nucleotide sequence encoding a first gRNA and a nucleotide sequence encoding a second gRNA, each independently targeting a target site in a genomic DNA molecule comprising a fatty-acid amide hydrolase gene (FAAH) upstream a FAAH pseudogene (FAAH-OUT) in a cell, wherein the first and second target sequences are selected from: (i) the nucleotide sequence of SEQ ID NO: 564 and the nucleotide sequence of SEQ ID NO: 629, 630, 644, 676, 692, 702, 705, 709, 712, or 723; (ii) the nucleotide sequence of SEQ ID NO: 579 and the nucleotide sequence of SEQ ID NO: 629, 630, 644, 676, 692, 702, 705, 709, 712, or 723; (ii) the nucleotide sequence of SEQ ID NO: 615 and the nucleotide sequence of SEQ ID NO: 629, 630, 644, 676, 692, 702, 705, 709, 712, 723; and (iv) the nucleotide sequence of SEQ ID NO: 621 and the nucleotide sequence of SEQ ID NO: 629, 630, 644, 676, 692, 702, 705, 709, 712, 723.

[0034] In some aspects, the disclosure provides a nucleic acid molecule comprising a nucleotide sequence encoding a first gRNA and a nucleotide sequence encoding a second gRNA, each independently targeting a target site in a genomic DNA molecule comprising a fatty-acid amide hydrolase gene (FAAH) upstream a FAAH pseudogene (FAAH-OUT) in a cell, wherein the first gRNA comprises a first spacer sequence and the second gRNA comprises a second spacer sequence, wherein the first and second spacer sequences are selected from: (i) the nucleotide sequence of SEQ ID NO: 750 and the nucleotide sequence of SEQ ID NO: 815, 816, 830, 862, 888, 891, 895, 898, or 909; (ii) the nucleotide sequence of SEQ ID NO: 765 and the nucleotide sequence of SEQ ID NO: 815, 816, 830, 862, 888, 891, 895, 898, or 909; (iii) the nucleotide sequence of SEQ ID NO: 801 and the nucleotide sequence of SEQ ID NO: 815, 816, 830, 862, 888, 891, 895, 898, or 909; and (iv) the nucleotide sequence of SEQ ID NO: 807 and the nucleotide sequence of SEQ ID NO: 815, 816, 830, 862, 888, 891, 895, 898, or 909.

[0035] In some aspects, the disclosure provides a nucleic acid molecule comprising: (i) a nucleotide sequence encoding a first gRNA comprising a spacer sequence corresponding to a first target sequence adjacent a first PAM which is downstream of a 3′ terminus of FAAH and upstream a transcriptional start site of FAAH-OUT in the genomic DNA molecule, wherein when the first gRNA is introduced into a cell with the site-directed endonuclease, the first gRNA combines with the site-directed endonuclease to induce cleavage proximal the first target sequence with a cleavage efficiency of at least 30%; and (ii) a and a nucleotide sequence encoding a second gRNA comprising a spacer sequence corresponding to a second target sequence adjacent a second PAM which is downstream of the FAAH-OUT transcriptional start site and upstream an exon 3 of FAAH-OUT in the genomic DNA molecule, wherein when the second gRNA is introduced into a cell with the site-directed endonuclease, the second gRNA combines with the site-directed endonuclease to induce cleavage proximal the second target sequence with a cleavage efficiency of at least 30%, wherein when the first and second gRNAs are introduced into a cell with a SluCas9 endonuclease or functional variant thereof, result in an approximate 2-8 kb deletion in a in a genomic DNA molecule comprising FAAH upstream FAAH-OUT, wherein the deletion results in full or partial removal of a FAAH-OUT promoter (FOP) and a FAAH-OUT conserved (FOC) element in the genomic DNA molecule.

[0036] In any of the foregoing or related aspects, the disclosure provides a recombinant expression vector comprising a nucleic acid molecule of the disclosure. In some aspects, the recombinant expression vector comprises a nucleotide sequence encoding a SluCas9 endonuclease or a functional variant thereof. In some aspects, the vector is a viral vector. In some aspects, the vector is an AAV vector. In some aspects, the recombinant expression vector is formulated in a lipid nanoparticle.

[0037] In some aspects, the disclosure provides a nucleic acid molecule comprising a nucleotide sequence encoding one or more gRNA molecules targeting a target site in a genomic DNA molecule comprising a fatty-acid amide hydrolase gene (FAAH) upstream a FAAH pseudogene (FAAH-OUT) in a cell, the gRNA(s) selected from: (i) a gRNA comprising a spacer sequence corresponding to a target sequence consisting of a nucleotide sequence selected from any one of SEQ ID NOs: 189, 193, 221, and 236; (ii) a gRNA comprising a spacer sequence corresponding to a target sequence consisting of a nucleotide sequence selected from any one of SEQ ID NOs: 290, 302, 306, 317, 348, 349, 353, 355, and 365; (iii) a gRNA molecule comprising a spacer sequence comprising a nucleotide sequence selected from any one of SEQ ID NOs: 374, 378, 406, and 421; (iv) a gRNA molecule comprising a spacer sequence comprising a nucleotide sequence selected from any one of SEQ ID NOs: 475, 487, 491, 502, 533, 534, 538, 540 and 550; (v) a combination of a gRNA of (i) and a gRNA of (ii); and (vi) a combination of a gRNA of (iii) and a gRNA of (iv).

[0038] In some aspects, the disclosure provides A nucleic acid molecule comprising a nucleotide sequence encoding a first gRNA and a nucleotide sequence encoding a second gRNA, each independently targeting a target site in a genomic DNA molecule comprising a fatty-acid amide hydrolase gene (FAAH) upstream a FAAH pseudogene (FAAH-OUT) in a cell, wherein the first and second target sequences are selected from: (i) the nucleotide sequence of SEQ ID NO: 189 and the nucleotide sequence of SEQ ID NO: 290, 302, 306, 317, 348, 349, 353, 355, or 365; (ii) the nucleotide sequence of SEQ ID NO: 193 and the nucleotide sequence of SEQ ID NO: 290, 302, 306, 317, 348, 349, 353, or 355; (iii) the nucleotide sequence of SEQ ID NO: 221 and the nucleotide.

[0039] In some aspects, the disclosure provides a nucleic acid molecule comprising a nucleotide sequence encoding a first gRNA and a nucleotide sequence encoding a second gRNA, each independently targeting a target site in a genomic DNA molecule comprising a fatty-acid amide hydrolase gene (FAAH) upstream a FAAH pseudogene (FAAH-OUT) in a cell, wherein the first gRNA comprises a first spacer sequence and the second gRNA comprises a second spacer sequence, wherein the first and second spacer sequences are selected from: (i) the nucleotide sequence of SEQ ID NO: 374 and the nucleotide sequence of SEQ ID NO: 475, 487, 491, 502, 533, 534, 538, 540, or 550; (ii) the nucleotide sequence of SEQ ID NO: 378 and the nucleotide sequence of SEQ ID NO: 475, 487, 491, 502, 533, 534, 538, or 540; (iii) the nucleotide sequence of SEQ ID NO: 406 and the nucleotide sequence of SEQ ID NO: 475, 487, 491, 502, 533, 534, 538, or 540; and (iv) the nucleotide sequence of SEQ ID NO: 421 and the nucleotide sequence of SEQ ID NO: 475, 491, 533, 534, or 540.

[0040] In some aspects, the disclosure provides a nucleic acid molecule comprising: (i) a nucleotide sequence encoding a first gRNA comprising a spacer sequence corresponding to a first target sequence adjacent a first PAM which is downstream of a 3′ terminus of FAAH and upstream a transcriptional start site of FAAH-OUT in the genomic DNA molecule, wherein when the first gRNA is introduced into a cell with the site-directed endonuclease, the first gRNA combines with the site-directed endonuclease to induce cleavage proximal the first target sequence with a cleavage efficiency of at least 30%; and (ii) a and a nucleotide sequence encoding a second gRNA comprising a spacer sequence corresponding to a second target sequence adjacent a second PAM which is downstream of the FAAH-OUT transcriptional start site and upstream an exon 3 of FAAH-OUT in the genomic DNA molecule, wherein when the second gRNA is introduced into a cell with the site-directed endonuclease, the second gRNA combines with the site-directed endonuclease to induce cleavage proximal the second target sequence with a cleavage efficiency of at least 30%, wherein when the first and second gRNAs are introduced into a cell with a SpCas9 endonuclease or functional variant thereof, result in an approximate 3-10 kb deletion in a in a genomic DNA molecule comprising FAAH upstream FAAH-OUT, wherein the deletion results in removal of a FAAH-OUT promoter (FOP) and a full or partial removal of a FAAH-OUT conserved (FOC) element in the genomic DNA molecule.

[0041] In some aspects, the disclosure provides a recombinant expression vector comprising a nucleic acid molecule of the disclosure. In some aspects, the recombinant expression vector comprises a nucleotide sequence encoding a SpCas9 endonuclease or a functional variant thereof. In some aspects, the vector is a viral vector. In some aspects, the vector is an AAV vector. In some aspects, the recombinant expression vector is formulated in a lipid nanoparticle.

[0042] In some aspects, the disclosure provides a nucleic acid molecule comprising a nucleotide sequence encoding one or more gRNA molecules targeting a target site in a genomic DNA molecule comprising a fatty-acid amide hydrolase gene (FAAH) upstream a FAAH pseudogene (FAAH-OUT) in a cell, the gRNA(s) selected from: (i) a gRNA comprising a spacer sequence corresponding to a target sequence consisting of a nucleotide sequence selected from any one of SEQ ID NOs: 930, 932, 939, 942, 947, 949, 956, 960, 967, 968, 976, and 980; (ii) a gRNA comprising a spacer sequence corresponding to a target sequence consisting of a nucleotide sequence selected from any one of SEQ ID NOs: 1046, 1073, 1087, and 1092; (iii) a gRNA molecule comprising a spacer sequence comprising a nucleotide sequence selected from any one of SEQ ID NOs: 1102, 1104, 1111, 1114, 1119, 1121, 1128, 1132, 1139, 1140, 1148, and 1152; (iv) a gRNA molecule comprising a spacer sequence comprising a nucleotide sequence selected from any one of SEQ ID NOs: 1218, 1245, 1259, and 1264; (v) a combination of a gRNA of (i) and a gRNA of (ii); and (vi) a combination of a gRNA of (iii) and a gRNA of (iv).

[0043] In some aspects, the disclosure provides a nucleic acid molecule comprising a nucleotide sequence encoding a first gRNA and a nucleotide sequence encoding a second gRNA, each independently targeting a target site in a genomic DNA molecule comprising a fatty-acid amide hydrolase gene (FAAH) upstream a FAAH pseudogene (FAAH-OUT) in a cell, wherein the first and second target sequences are selected from: (i) the nucleotide sequence of SEQ ID NO: 930, 932, 939, 942, 947, 949, 956, 960, 967, 968, 976, or 980 and the nucleotide sequence of SEQ ID NO: 1046; (ii) the nucleotide sequence of SEQ ID NO: 930, 932, 939, 942, 947, 949, 956, 960, 967, 968, 976, or 980 and the nucleotide sequence of SEQ ID NO: 1073; (iii) the nucleotide sequence of SEQ ID NO: 930, 932, 939, 942, 947, 949, 956, 960, 967, 968, 976, or 980 and the nucleotide sequence of SEQ ID NO: 1087; and (iv) the nucleotide sequence of SEQ ID NO: 930, 956, 960, 967, 968, 976, or 980 and the nucleotide sequence of SEQ ID NO: 1092.

[0044] In some aspects, the disclosure provides a nucleic acid molecule comprising a nucleotide sequence encoding a first gRNA and a nucleotide sequence encoding a second gRNA, each independently targeting a target site in a genomic DNA molecule comprising a fatty-acid amide hydrolase gene (FAAH) upstream a FAAH pseudogene (FAAH-OUT) in a cell, wherein the first gRNA comprises a first spacer sequence and the second gRNA comprises a second spacer sequence, wherein the first and second spacer sequences are selected from: (i) the nucleotide sequence of SEQ ID NO: 1102, 1104, 1111, 1119, 1121, 1128, 1132, 1139, 1140, 1148, or 1152 and the nucleotide sequence of SEQ ID NO: 1218; (ii) the nucleotide sequence of SEQ ID NO: 1102, 1104, 1111, 1119, 1121, 1128, 1132, 1139, 1140, 1148, or 1152 and the nucleotide sequence of SEQ ID NO: 1245; (iii) the nucleotide sequence of SEQ ID NO: 1102, 1104, 1111, 1119, 1121, 1128, 1132, 1139, 1140, 1148, or 1152 and the nucleotide sequence of SEQ ID NO: 1259; and (iv) the nucleotide sequence of SEQ ID NO: 1102, 1128, 1132, 1139, 1140, 1148, or 1152 and the nucleotide sequence of SEQ ID NO: 1264.

[0045] In some aspects, the disclosure provides a nucleic acid molecule comprising: (i) a nucleotide sequence encoding a first gRNA comprising a spacer sequence corresponding to a first target sequence adjacent a first PAM which is downstream of a 3′ terminus of FAAH and upstream a transcriptional start site of FAAH-OUT in the genomic DNA molecule, wherein when the first gRNA is introduced into a cell with a site-directed endonuclease, the first gRNA combines with the site-directed endonuclease to induce cleavage proximal the first target sequence with a cleavage efficiency of at least 15%; and (ii) a and a nucleotide sequence encoding a second gRNA comprising a spacer sequence corresponding to a second target sequence adjacent a second PAM which is downstream of the FAAH-OUT transcriptional start site and upstream an exon 3 of FAAH-OUT in the genomic DNA molecule, wherein when the second gRNA is introduced into a cell with the site-directed endonuclease, the second gRNA combines with a site-directed endonuclease to induce cleavage proximal the second target sequence with a cleavage efficiency of at least 20%, wherein when the first and second gRNAs are introduced into a cell with a SaCas9 endonuclease or functional variant thereof, result in an approximate 3-10 kb deletion in a in a genomic DNA molecule comprising FAAH upstream FAAH-OUT, wherein the deletion results in removal of a FAAH-OUT promoter (FOP) and a full or partial removal of a FAAH-OUT conserved (FOC) element in the genomic DNA molecule.

[0046] In some aspects, the disclosure provides a recombinant expression vector comprising a nucleic acid molecule of the disclosure. In some aspects, the recombinant expression vector comprises a nucleotide sequence encoding a SaCas9 endonuclease or a functional variant thereof. In some aspects, the vector is a viral vector. In some aspects, the vector is an AAV vector. In some aspects, the recombinant expression vector is formulated in a lipid nanoparticle.

[0047] In any of the foregoing or related aspects, the disclosure provides a pharmaceutical composition comprising the system, the nucleic acid, or the recombinant expression vector of the disclosure, and a pharmaceutically acceptable carrier.

[0048] In any of the foregoing or related aspects, the disclosure provides a kit comprising a container comprising the system, the nucleic acid molecule, the recombinant expression vector, or the pharmaceutical composition of the disclosure for introducing a deletion in a genomic DNA molecule comprising FAAH upstream FAAH-OUT in a cell, and a package insert comprising instructions for use. In some aspects, the disclosure provides a kit comprising a container comprising the system, the nucleic acid molecule, the recombinant expression vector, or the pharmaceutical composition of the disclosure for reducing FAAH expression in a cell, and a package insert comprising instructions for use. In some aspects, the disclosure provides a kit comprising a container comprising the system, the nucleic acid molecule, the recombinant expression vector, or the pharmaceutical composition of the disclosure for use in treating chronic pain in a subject in need thereof, and a package insert comprising instructions for use.

[0049] In any of the foregoing or related aspects, the disclosure provides the system, the nucleic acid molecule, the recombinant expression vector, or the pharmaceutical composition of the disclosure, for use in treating a patient with chronic pain by reducing FAAH expression in a cell, the treatment comprising: administering to the patient an effective amount of the system, the nucleic acid molecule, the recombinant expression vector, or the pharmaceutical composition, wherein when the system, the nucleic acid molecule, the recombinant expression vector, or the pharmaceutical composition is administered, the first gRNA and second gRNA combine with the site-directed endonuclease to induce a deletion in the genomic DNA molecule comprising FAAH upstream FAAH-OUT in the cell, thereby reducing FAAH expression in the target cell.

[0050] In any of the foregoing or related aspects, the disclosure provides a method for reducing FAAH expression in a cell, the method comprising: contacting the cell with the system, the nucleic acid molecule, the recombinant expression vector, or the pharmaceutical composition of the disclosure, wherein when the system, the nucleic acid molecule, the recombinant expression vector, or the pharmaceutical composition contacts the cell, the first gRNA and second gRNA combine with the site-directed endonuclease to induce a deletion in the genomic DNA molecule comprising FAAH upstream FAAH-OUT in the cell, thereby resulting in reduced FAAH expression in the cell. In some aspects, wherein when the system, the nucleic acid molecule, the recombinant expression vector, or the pharmaceutical composition is contacted with a population of cells, the method results in: (i) a reduction of FAAH mRNA expression by at least about 15%, about 20%, about 25%, about 30%, about 35%, about 40%, about 45%, or about 50% relative to a population of unmodified cells; (ii) a reduction of FAAH polypeptide by at least about 15%, about 20%, about 25%, about 30%, about 35%, about 40%, about 45%, or about 50% relative to a population of unmodified cells; or (iv) a combination of (i)-(ii).

[0051] In any of the foregoing or related aspects, the disclosure provides a method of treating a patient with chronic pain by reducing FAAH expression in a target cell, the method comprising: administering to the patient an effective amount of the system, nucleic acid molecule, the recombinant expression vector, or the pharmaceutical composition of the disclosure, wherein when the system, the nucleic acid molecule, the recombinant expression vector, or the pharmaceutical composition is administered, the first gRNA and second gRNA combine with the site-directed endonuclease to induce a deletion in the genomic DNA molecule comprising FAAH upstream FAAH-OUT in the cell, thereby reducing FAAH expression in the target cell. In some aspects, the target cell resides in the brain. In some aspects, the target cell resides in the dorsal root ganglion (DRG). In some aspects, the target cell is a sensory neuron. In some aspects, the route of administration is intra-DRG, intraneural, intrathecal, intra-cisternamagna, and intravenous. In some aspects, the method results in reduced FAAH expression results in increased levels of one or more N-acyl ethanolamines one or more N-acyl taurines, and/or oleamide. In some aspects, the one or more N-acyl ethanolamine are selected from: N-arachidonoyl ethanolamine (AEA), palmitoylethanolamide (PEA), oleoylethanolamine (OEA), or combination thereof.

[0052] In some aspects, the disclosure provides a system for introducing a mutation in a genomic DNA molecule comprising FAAH in a cell, the system comprising: (i) a site-directed endonuclease in the form of protein, an mRNA encoding the site-directed endonuclease, or a recombinant expression vector comprising a nucleotide sequence encoding the site-directed endonuclease; and (ii) a gRNA molecule comprising a spacer sequence corresponding to a target sequence within or proximal exon 1, exon 2, exon 3, or exon 4 of the FAAH coding sequence, wherein when the gRNA is introduced into a cell with the site-directed endonuclease, the gRNA combines with the endonuclease to induce a cleavage proximal the target sequence in the genomic DNA with a cleavage efficiency of at least 15%, 20%, 25%, 30%, 35%, 40%, 45%, or 50%, wherein the cleavage is a double-stranded DNA break (DSB), whereby repair of the DSB results in a mutation, and wherein the mutation provides reduced cellular expression of FAAH mRNA by at least 15%, 20%, 25%, 30%, 35%, 40%, 45%, 50%, 55%, 60%, 65%, 70%, 75%, 80%, 85%, or 90% in the cell. In some aspects, the PAM is NNGG, NGG, or NNGRRT. In some aspects, the site-directed endonuclease is a SluCas9 endonuclease or a functional derivative thereof, an mRNA encoding the SluCas9 endonuclease or functional derivative thereof, or a recombinant expression vector comprising a nucleotide sequence encoding the SluCas9 endonuclease or functional derivative thereof. In some aspects, the site-directed endonuclease is a SpCas9 polypeptide or functional derivative thereof, an mRNA encoding the SpCas9 endonuclease or functional derivative thereof, or a recombinant expression vector comprising a nucleotide sequence encoding the SpCas9 endonuclease or functional derivative thereof. In some aspects, the site-directed endonuclease is a SaCas9 polypeptide or functional derivative thereof, an mRNA encoding the SaCas9 endonuclease or functional derivative thereof, or a recombinant expression vector comprising a nucleotide sequence encoding the SaCas9 endonuclease or functional derivative thereof.

[0053] In some aspects, the disclosure provides system for introducing a mutation in a genomic DNA molecule comprising FAAH in a cell, the system comprising: (i) a site-directed endonuclease that is a SluCas9 endonuclease or a functional derivative thereof, an mRNA encoding the SluCas9 endonuclease or functional derivative thereof, or a recombinant expression vector comprising a nucleotide sequence encoding the SluCas9 endonuclease or functional derivative thereof; and (ii) molecule comprising a spacer sequence corresponding to a target sequence within or proximal exon 1, exon 2, exon 3, or exon 4 of the FAAH coding sequence, wherein when the gRNA is introduced into a cell with the site-directed endonuclease, the gRNA combines with the endonuclease to induce a cleavage proximal the target sequence in the genomic DNA with a cleavage efficiency of at least 15%, 20%, 25%, 30%, 35%, 40%, 45%, or 50%, wherein the cleavage is a double-stranded DNA break (DSB), whereby repair of the DSB results in a mutation, and wherein the mutation provides reduced cellular expression of FAAH mRNA by at least 15%, 20%, 25%, 30%, 35%, 40%, 45%, 50%, 55%, 60%, 65%, 70%, 75%, 80%, 85%, or 90% in the cell. In some aspects, the PAM is NNGG.

[0054] In any of the foregoing or related aspects, the target sequence is within exon 1 or exon 2 of FAAH. In some aspects, the mutation is an insertion or deletion (INDEL), optionally wherein the mutation is a frameshift mutation, introduction of a stop codon, or a point mutation. In some aspects, the spacer sequence comprises: a nucleotide sequence having up to 1, 2, or 3 nucleotide deletions or substitutions relative to any one of SEQ ID NOs: 116, 117, 119, 128, 135, 136, 140, and 147. In some aspects, the spacer sequence comprises: a nucleotide sequence set forth in any one of SEQ ID NOs: 116, 117, 119, 128, 135, 136, 140, and 147. In some aspects, target sequence is proximal exon 1 or exon 2 of FAAH. In some aspects, the mutation is an insertion or deletion (INDEL), optionally wherein the mutation is in a splicing element selected from: a 5′ splice site, a 3′ splice site, a branch point sequence, and a pyrimidine tract. In some aspects, the spacer sequence comprises: a nucleotide sequence having up to 1, 2, or 3 nucleotide deletions or substitutions relative to SEQ ID NO: 112 or SEQ ID NO: 133. In some aspects, the spacer sequence comprises: a nucleotide sequence set forth in SEQ ID NO: 112 or SEQ ID NO: 133.

[0055] In some aspects, the disclosure provides a system for introducing a mutation in a genomic DNA molecule comprising FAAH in a cell, the system comprising: (i) a site-directed endonuclease that is a SpCas9 polypeptide or functional derivative thereof, an mRNA encoding the SpCas9 endonuclease or functional derivative thereof, or a recombinant expression vector comprising a nucleotide sequence encoding the SpCas9 endonuclease or functional derivative thereof; and (ii) molecule comprising a spacer sequence corresponding to a target sequence within or proximal exon 1, exon 2, exon 3, or exon 4 of the FAAH coding sequence, wherein when the gRNA is introduced into a cell with the site-directed endonuclease, the gRNA combines with the endonuclease to induce a cleavage proximal the target sequence in the genomic DNA with a cleavage efficiency of at least 15%, 20%, 25%, 30%, 35%, 40%, 45%, or 50%, wherein the cleavage is a double-stranded DNA break (DSB), whereby repair of the DSB results in a mutation, and wherein the mutation provides reduced cellular expression of FAAH mRNA by at least 15%, 20%, 25%, 30%, 35%, 40%, 45%, 50%, 55%, 60%, 65%, 70%, 75%, 80%, 85%, or 90% in the cell. In some aspects, the PAM is NGG.

[0056] In any of the foregoing or related aspects, the target sequence is within exon 1 or exon 2 of FAAH. In some aspects, the mutation is an insertion or deletion (INDEL), optionally wherein the mutation is a frameshift mutation, introduction of a stop codon, or a point mutation. In some aspects, the spacer sequence comprises: a nucleotide sequence having up to 1, 2, or 3 nucleotide deletions or substitutions relative to any one of SEQ ID NOs: 42, 43, 60, 63, 64, 65, 66, and 68. In some aspects, the spacer sequence comprises: a nucleotide sequence set forth in any one of SEQ ID NOs: 42, 43, 60, 63, 64, 65, 66, and 68. In some aspects, the target sequence is proximal exon 1 or exon 2 of FAAH. In some aspects, the mutation is an insertion or deletion (INDEL), optionally wherein the mutation is in a splicing element selected from: a 5′ splice site, a 3′ splice site, a branch point sequence, and a pyrimidine tract. In some aspects, the spacer sequence comprises: a nucleotide sequence having up to 1, 2, or 3 nucleotide deletions or substitutions relative to SEQ ID NO: 56 or SEQ ID NO: 57. In some aspects, the spacer sequence comprises: a nucleotide sequence set forth in SEQ ID NO: 56 or SEQ ID NO: 57.

[0057] In some aspects, the disclosure provides system for introducing a mutation in a genomic DNA molecule comprising FAAH in a cell, the system comprising: (i) a site-directed endonuclease that is a SaCas9 polypeptide or functional derivative thereof, an mRNA encoding the SaCas9 endonuclease or functional derivative thereof, or a recombinant expression vector comprising a nucleotide sequence encoding the SaCas9 endonuclease or functional derivative thereof; and (ii) molecule comprising a spacer sequence corresponding to a target sequence within or proximal exon 1, exon 2, exon 3, or exon 4 of the FAAH coding sequence, wherein when the gRNA is introduced into a cell with the site-directed endonuclease, the gRNA combines with the endonuclease to induce a cleavage proximal the target sequence in the genomic DNA with a cleavage efficiency of at least 15%, 20%, 25%, 30%, 35%, 40%, 45%, or 50%, wherein the cleavage is a double-stranded DNA break (DSB), whereby repair of the DSB results in a mutation, and wherein the mutation provides reduced cellular expression of FAAH mRNA by at least 15%, 20%, 25%, 30%, 35%, 40%, 45%, 50%, 55%, 60%, 65%, 70%, 75%, 80%, 85%, or 90% in the cell. In some aspects, the PAM is NNGRRT.

[0058] In any of the foregoing or related aspects, the target sequence is within exon 1, exon 2, exon 3, or exon 4 of FAAH. In some aspects, the mutation is an insertion or deletion (INDEL), optionally wherein the mutation is a frameshift mutation, introduction of a stop codon, or a point mutation. In some aspects, the spacer sequence comprises: a nucleotide sequence having up to 1, 2, or 3 nucleotide deletions or substitutions relative to any one of SEQ ID NOs: 171, 172, 174, 175, 176, 177, 178, and 179. In some aspects, the spacer sequence comprises: a nucleotide sequence set forth in any one of SEQ ID NOs: 171, 172, 174, 175, 176, 177, 178, and 179. In some aspects, the target sequence is proximal exon 1, exon 2, exon 3, or exon 4 of FAAH. In some aspects, the mutation is an insertion or deletion (INDEL), optionally wherein the mutation is in a splicing element selected from: a 5′ splice site, a 3′ splice site, a branch point sequence, and a pyrimidine tract. In some aspects, the spacer sequence comprises: a nucleotide sequence having up to 1, 2, or 3 nucleotide deletions or substitutions relative to any one of SEQ ID NOs: 165, 166, 167, 169, and 180. In some aspects, the spacer sequence comprises: a nucleotide sequence set forth in any one of SEQ ID NOs: 165, 166, 167, 169, and 180. In some aspects, the spacer sequence comprises: a nucleotide sequence having up to 1, 2, or 3 nucleotide deletions or substitutions relative to any one of SEQ ID NOs: 165, 171, 175, 176, and 177. In some aspects, the spacer sequence comprises: a nucleotide sequence set forth in any one of SEQ ID NOs: 165, 171, 175, 176, and 177.

[0059] In some aspects, the disclosure provides a system for use with a site-directed endonuclease to introduce a mutation in a genomic DNA molecule comprising FAAH in a cell, the system comprising a gRNA molecule targeting a target site in the genomic DNA molecule, wherein the gRNA comprises: (i) a spacer sequence corresponding to a target sequence consisting of a nucleotide sequence selected from any one of SEQ ID NOs: 69, 70, 78, 89, 90, 92, and 102; (ii) a spacer sequence corresponding to a target sequence consisting of a nucleotide sequence selected from any one of SEQ ID NOs: 72, 76, 77, 79, 88, 93, 95, 96, 100, 103, 104, and 107; (iii) a spacer sequence comprising a nucleotide sequence selected from any one of SEQ ID NOs: 109, 110, 118, 129, 130, 132, and 142; or (iv) a spacer sequence comprising a nucleotide sequence selected from any one of SEQ ID NOs: 112, 116, 117, 119, 128, 133, 135, 136, 140, 143, 144, and 147. In some aspects, the system comprises a site directed endonuclease which recognizes a PAM NNGG. In some aspects, the site-directed endonuclease is a SluCas9 endonuclease or a functional derivative thereof, an mRNA encoding the SluCas9 endonuclease or functional derivative thereof, or a recombinant expression vector comprising a nucleotide sequence encoding the SluCas9 endonuclease or functional derivative thereof.

[0060] In some aspects, the disclosure provides a system for use with a site-directed endonuclease to introduce a mutation in a genomic DNA molecule comprising FAAH in a cell, the system comprising a gRNA molecule targeting a target site in the genomic DNA molecule, wherein the gRNA comprises: (i) a spacer sequence corresponding to a target sequence consisting of a nucleotide sequence selected from any one of SEQ ID NOs: 4, 5, 7, 14, and 20; (ii) a spacer sequence corresponding to a target sequence consisting of a nucleotide sequence selected from any one of SEQ ID NOs: 3, 6, 8-13, 16-19, 21-34; (iii) a spacer sequence comprising a nucleotide sequence selected from any one of SEQ ID NOs: 38, 39, 41, 48, and 54; and (iv) a spacer sequence comprising a nucleotide sequence selected from any one of SEQ ID NOs: 37, 40, 42-47, 50-53, 55-68. In some aspects, the system comprises a site directed endonuclease which recognizes a PAM NGG. In some aspects, the site-directed endonuclease is a SpCas9 endonuclease or a functional derivative thereof, an mRNA encoding the SpCas9 endonuclease or functional derivative thereof, or a recombinant expression vector comprising a nucleotide sequence encoding the SpCas9 endonuclease or functional derivative thereof.

[0061] In some aspects, the disclosure provides a system for use with a site-directed endonuclease to introduce a mutation in a genomic DNA molecule comprising FAAH in a cell, the system comprising a gRNA molecule targeting a target site in the genomic DNA molecule, wherein the gRNA comprises: (i) a spacer sequence corresponding to a target sequence consisting of a nucleotide sequence selected from any one of SEQ ID NOs: 149, 150, 151, 152, 153, 155, 156, 158, 159, 160, 161, 162, 163 and 164; or (ii) a spacer sequence comprising a nucleotide sequence selected from any one of SEQ ID NOs: 165, 166, 167, 168, 169, 171, 172, 174, 175, 176, 177, 178, 179, and 180. In some aspects, the system comprises a site directed endonuclease which recognizes a PAM NNGRRT. In some aspects, the site-directed endonuclease is a SaCas9 endonuclease or a functional derivative thereof, an mRNA encoding the SaCas9 endonuclease or functional derivative thereof, or a recombinant expression vector comprising a nucleotide sequence encoding the SaCas9 endonuclease or functional derivative thereof.

[0062] In any of the foregoing or related aspects, the mutation provides a FAAH allele resulting in: (i) a truncated FAAH protein or an altered open reading frame (ORF) relative to wild-type FAAH; (ii) a decreased rate of transcription relative to wild-type FAAH; (iii) a pre-mRNA transcript with improper splicing relative to a pre-mRNA transcribed from wild-type FAAH; (iv) a reduced amount of mRNA transcript relative to wild-type FAAH; (v) an mRNA transcript with increased rate of degradation and/or decreased half-life compared to wild-type FAAH mRNA; (vi) an mRNA transcript with a decreased rate of translation relative to wild-type FAAH mRNA; (vii) a reduced amount of polypeptide product compared to wild-type FAAH; (viii) a polypeptide product with one or more mutations relative to a wild-type FAAH polypeptide; (ix) a polypeptide with reduced enzymatic activity relative to wild-type FAAH polypeptide; or (x) any combination of (i)-(ix).

[0063] In any of the foregoing or related aspects, wherein when the system is introduced to a population of cells comprising the genomic DNA molecule, the system results in (i) a reduction of FAAH mRNA expression by at least about 15%, about 20%, about 25%, about 30%, about 35%, about 40%, about 45%, or about 50% relative to a population of unmodified cells; (ii) a reduction of FAAH polypeptide by at least about 15%, about 20%, about 25%, about 30%, about 35%, about 40%, about 45%, or about 50% relative to a population of unmodified cells; or (iii) a combination of (i)-(ii).

[0064] In any of the foregoing or related aspects, the system comprises a recombinant expression vector comprising a nucleotide sequence encoding the site directed endonuclease. In some aspects, the system comprises a recombinant expression vector comprising (i) a nucleotide sequence encoding the site directed endonuclease, and (ii) a nucleotide sequence encoding the gRNA. In some aspects, the system comprises a first recombinant expression vector comprising a nucleotide sequence encoding the site-directed endonuclease, and a second recombinant expression vector comprising a nucleotide sequence encoding the gRNA.

[0065] In some aspects, the system comprises a recombinant expression vector comprising (i) a nucleotide sequence encoding the site directed endonuclease, and (ii) a nucleotide sequence encoding the gRNA, wherein the gRNA comprises: (i) a gRNA molecule comprising a spacer sequence comprising a nucleotide sequence set forth in SEQ ID NO: 165, 171, 175, 176 or 177; or; (ii) a gRNA comprising a spacer sequence corresponding to a target sequence consisting of a nucleotide sequence set forth in SEQ ID NO: 149, 155, 159, 160 or 161.

[0066] In some aspects, the system comprises a recombinant expression vector comprising (i) a nucleotide sequence encoding the site directed endonuclease, and (ii) a nucleotide sequence encoding the gRNA, wherein the gRNA comprises: (i) a gRNA comprising a spacer sequence corresponding to a target sequence consisting of a nucleotide sequence set forth in SEQ ID NO: 29, 30, 31, 32 or 34; or (ii) a gRNA molecule comprising a spacer sequence comprising a nucleotide sequence set forth in SEQ ID NO: 63, 64, 65, 66 or 68.

[0067] In some aspects, the vector is a viral vector. In some aspects, the vector is an AAV vector. In some aspects, the gRNA and the site-directed endonuclease are individually formulated or co-formulated in a lipid nanoparticle. In some aspects, the system comprises an mRNA encoding the site-directed endonuclease. In some aspects, the system comprises the site-directed endonuclease. In some aspects, the system comprises ribonucleoprotein complex of the gRNA and the site-directed endonuclease. In some aspects, the gRNA and the site-directed nuclease are individually formulated or co-formulated in a lipid nanoparticle.

[0068] In some aspects, the disclosure provides a nucleic acid molecule comprising a nucleotide sequence encoding one or more gRNA molecules targeting a target site in a genomic DNA molecule comprising a fatty-acid amide hydrolase gene (FAAH) in a cell, the gRNA(s) selected from: (i) a gRNA comprising a spacer sequence corresponding to a target sequence consisting of a nucleotide sequence selected any one of SEQ ID NOs: 69, 70, 78, 89, 90, 92, and 102; (ii) a gRNA comprising a spacer sequence corresponding to a target sequence consisting of a nucleotide sequence selected from any one of SEQ ID NOs: 72, 76, 77, 79, 88, 93, 95, 96, 100, 103, 104, and 107; (iii) a gRNA molecule comprising a spacer sequence comprising a nucleotide sequence selected from any one of SEQ ID NOs: 109, 110, 118, 129, 130, 132, and 142; or (iv) a gRNA molecule comprising a spacer sequence comprising a nucleotide sequence selected from any one of SEQ ID NOs: 112, 116, 117, 119, 128, 133, 135, 136, 140, 143, 144, and 147.

[0069] In some aspects, the disclosure provides a nucleotide sequence encoding a gRNA comprising a spacer sequence corresponding to a target sequence within or proximal exon 1 or exon 2 of the FAAH coding sequence, wherein when the gRNA is introduced into a cell with a SluCas9 endonuclease or functional derivative thereof, the gRNA combines with the endonuclease to induce a cleavage proximal the target sequence in the genomic DNA with a cleavage efficiency of at least 15%, 20%, 25%, 30%, 35%, 40%, 45%, or 50%, wherein the cleavage is a double-stranded DNA break (DSB), whereby repair of the DSB results in a mutation, and wherein the mutation provides reduced cellular expression of FAAH mRNA by at least 15%, 20%, 25%, 30%, 35%, 40%, 45%, 50%, 55%, 60%, 65%, 70%, or 75% in the cell.

[0070] In any of the foregoing or related aspects, a recombinant expression vector comprising a nucleic acid molecule of the disclosure. In some aspects, the recombinant expression vector comprises a nucleotide sequence encoding a SluCas9 endonuclease or a functional variant thereof. In some aspects, the vector is a viral vector. In some aspects, the vector is an AAV vector. In some aspects, the vector is formulated in a lipid nanoparticle.

[0071] In some aspects, the disclosure provides a nucleic acid molecule comprising a nucleotide sequence encoding one or more gRNA molecules targeting a target site in a genomic DNA molecule comprising a fatty-acid amide hydrolase gene (FAAH) in a cell, the gRNA(s) selected from: (i) a gRNA comprising a spacer sequence corresponding to a target sequence consisting of a nucleotide sequence selected from any one of SEQ ID NOs: 4, 5, 7, 14, and 20; (ii) a gRNA comprising a spacer sequence corresponding to a target sequence consisting of a nucleotide sequence selected from any one of SEQ ID NOs: 3, 6, 8-13, 16-19, 21-34; (iii) a gRNA molecule comprising a spacer sequence comprising a nucleotide sequence selected from any one of SEQ ID NOs: 38, 39, 41, 48, and 54; (iv) a gRNA molecule comprising a spacer sequence comprising a nucleotide sequence selected from any one of SEQ ID NOs: 37, 40, 42-47, 50-53, 55-68; (v) a gRNA molecule comprising a spacer sequence comprising a nucleotide sequence selected from any one of 42, 43, 60, 63, 64, 65, 66, and 68; or (vi) a gRNA molecule comprising a spacer sequence comprising a nucleotide sequence selected from any one of 63, 64, 65, 66 or 68.

[0072] In some aspects, the disclosure provides a nucleic acid molecule comprising: a nucleotide sequence encoding a gRNA comprising a spacer sequence corresponding to a target sequence within or proximal exon 1 or exon 2 of the FAAH coding sequence, wherein when the gRNA is introduced into a cell with a SpCas9 endonuclease or functional derivative thereof, the gRNA combines with the endonuclease to induce a cleavage proximal the target sequence in the genomic DNA with a cleavage efficiency of at least 15%, 20%, 25%, 30%, 35%, 40%, 45%, or 50%, wherein the cleavage is a double-stranded DNA break (DSB), whereby repair of the DSB results in a mutation, and wherein the mutation provides reduced cellular expression of FAAH mRNA by at least 15%, 20%, 25%, 30%, 35%, 40%, 45%, 50%, 55%, 60%, 65%, 70%, or 75% in the cell.

[0073] In any of the foregoing or related aspects, a recombinant expression vector comprising a nucleic acid molecule of the disclosure. In some aspects, the recombinant expression vector comprises a nucleotide sequence encoding a SpCas9 endonuclease or a functional variant thereof. In some aspects, the vector is a viral vector. In some aspects, the vector is an AAV vector. In some aspects, the vector is formulated in a lipid nanoparticle.

[0074] In some aspects, the disclosure provides a nucleic acid molecule comprising a nucleotide sequence encoding one or more gRNA molecules targeting a target site in a genomic DNA molecule comprising a fatty-acid amide hydrolase gene (FAAH) in a cell, the gRNA(s) selected from: (i) a gRNA comprising a spacer sequence corresponding to a target sequence consisting of a nucleotide sequence selected from any one of SEQ ID NOs: 149, 150, 151, 152, 153, 155, 156, 158, 159, 160, 161, 162, 163 and 164; (ii) a gRNA molecule comprising a spacer sequence comprising a nucleotide sequence selected from any one of SEQ ID NOs: 165, 166, 167, 168, 169, 171, 172, 174, 175, 176, 177, 178, 179, and 180; or (iii) a g RNA molecule comprising a spacer sequence comprising a nucleotide sequence selected from any one of 165, 171, 175, 176 and 177.

[0075] In some aspects, the disclosure provides a nucleic acid molecule comprising: a nucleotide sequence encoding a gRNA comprising a spacer sequence corresponding to a target sequence within or proximal exon 1, exon 2, exon 3, or exon 4 of the FAAH coding sequence, wherein when the gRNA is introduced into a cell with a SaCas9 endonuclease or functional derivative thereof, the gRNA combines with the endonuclease to induce a cleavage proximal the target sequence in the genomic DNA with a cleavage efficiency of at least 15%, 20%, 25%, 30%, 35%, 40%, 45%, or 50%, wherein the cleavage is a double-stranded DNA break (DSB), whereby repair of the DSB results in a mutation, and wherein the mutation provides reduced cellular expression of FAAH mRNA by at least 15%, 20%, 25%, 30%, 35%, 40%, 45%, 50%, 55%, 60%, 65%, 70%, 75%, 80%, 85%, or 90% in the cell.

[0076] In any of the foregoing or related aspects, a recombinant expression vector comprising a nucleic acid molecule of the disclosure. In some aspects, the recombinant expression vector comprises a nucleotide sequence encoding a SaCas9 endonuclease or a functional variant thereof. In some aspects, the vector is a viral vector. In some aspects, the vector is an AAV vector. In some aspects, the vector is formulated in a lipid nanoparticle.

[0077] In any of the foregoing or related aspects, the disclosure provides a pharmaceutical composition comprising the system, the nucleic acid, or the recombinant expression vector of the disclosure, and a pharmaceutically acceptable carrier.

[0078] In any of the foregoing or related aspects, the disclosure provides a kit comprising a container comprising the system, the nucleic acid molecule, the recombinant expression vector, or the pharmaceutical composition of the disclosure for introducing a mutation in a genomic DNA molecule comprising FAAH in a cell, and a package insert comprising instructions for use. In some aspects, the disclosure provides a kit comprising a container comprising the system, the nucleic acid molecule, the recombinant expression vector, or the pharmaceutical composition of the disclosure for reducing FAAH expression in a cell, and a package insert comprising instructions for use. In some aspects, the disclosure provides a kit comprising a container comprising the system, the nucleic acid molecule, the recombinant expression vector, or the pharmaceutical composition of the disclosure for use in treating chronic pain in a subject in need thereof, and a package insert comprising instructions for use.

[0079] In any of the foregoing or related aspects, the disclosure provides the system, the nucleic acid molecule, the recombinant expression vector, or the pharmaceutical composition of the disclosure for the manufacture of a medicament for use in treating a patient having chronic pain by introducing a genomic edit in a genomic molecule comprising FAAH upstream FAAH-OUT in a cell.

[0080] In any of the foregoing or related aspects, the disclosure provides the system, the nucleic acid molecule, the recombinant expression vector, or the pharmaceutical composition, for use in treating a patient with chronic pain by reducing FAAH expression in a cell, the treatment comprising: administering to the patient an effective amount of the system, the nucleic acid molecule, the recombinant expression vector, or the pharmaceutical composition, wherein when the system, the nucleic acid molecule, the recombinant expression vector, or the pharmaceutical composition is administered, the gRNA combines with the site-directed endonuclease to induce a mutation within or proximal one or more exons of the FAAH coding sequence selected from exon 1, exon 2, exon3, and exon 4, thereby reducing FAAH expression in the target cell.

[0081] In any of the foregoing or related aspects, the disclosure provides a method for reducing FAAH expression in a cell, the method comprising: contacting the cell with the system, the nucleic acid molecule, the recombinant expression vector, or the pharmaceutical composition, wherein when the system, the nucleic acid molecule, the recombinant expression vector, or the pharmaceutical composition contacts the cell, the gRNA combines with the site-directed endonuclease to induce a mutation within or proximal one or more exons of the FAAH coding sequence selected from exon 1, exon 2, exon 3, and exon 4, thereby resulting in reduced FAAH expression in the cell. In some aspects, wherein when the system, the nucleic acid molecule, the recombinant expression vector, or the pharmaceutical composition is contacted with a population of cells, the method results in: (i) a reduction of FAAH mRNA expression by at least about 15%, about 20%, about 25%, about 30%, about 35%, about 40%, about 45%, or about 50% relative to a population of unmodified cells; (ii) a reduction of FAAH polypeptide by at least about 15%, about 20%, about 25%, about 30%, about 35%, about 40%, about 45%, or about 50% relative to a population of unmodified cells; or (iii) a combination of (i)-(ii).

[0082] In any of the foregoing or related aspects, the disclosure provides a method of treating a patient with chronic pain by reducing FAAH expression in a target cell, the method comprising: administering to the patient an effective amount of the system, the nucleic acid molecule, the recombinant expression vector. or the pharmaceutical composition, wherein when the system, the nucleic acid molecule, the recombinant expression vector, or the pharmaceutical composition is administered, the gRNA combines with the site-directed endonuclease to induce a mutation within or proximal one or more exons of the FAAH coding sequence selected from exon 1, exon 2, exon 3, and exon 4, thereby reducing FAAH expression in the target cell. In some aspects, the target cell resides in the brain. In some aspects, the target cell resides in the dorsal root ganglion (DRG). In some aspects, the target cell is a sensory neuron. In some aspects, the route of administration is intra-DRG, intraneural, intrathecal, intra-cisternamagna, and intravenous. In some aspects, reduced FAAH expression results in increased levels of one or more N-acyl ethanolamines one or more N-acyl taurines, and/or oleamide. In some aspects, the one or more N-acyl ethanolamine are selected from: N-arachidonoyl ethanolamine (AEA), palmitoylethanolamide (PEA), oleoylethanolamine (OEA), or combination thereof.

### BRIEF DESCRIPTION OF THE DRAWINGS

[0083] The patent or application file contains at least one drawing executed in color. Copies of this patent or patent application publication with color drawing(s) will be provided by the Office upon request and payment of the necessary fee.

[0084] FIGS. 1A-1C provide bar graphs quantifying editing efficiency (FIG. 1A), FAAH mRNA levels (FIG. 1B), and FAAH protein levels (FIG. 1C) in cells electroporated with SpCas9 and indicated sgRNAs targeting within or proximal the human FAAH coding sequence (CDS). As shown in FIG. 1A, editing efficiency is measured by TIDE analysis, with guides ranked based on frequency of insertions or deletions (INDELs) that are expected to result in a frameshift mutation (“Frameshift INDELs”). Guides with cut locations located in intronic regions of FAAH are annotated by asterisk (*) and frameshift INDELs represents the total frequency of INDELs minus the frequency of INDELs that are a multiple of 3. As shown in FIG. 1B, FAAH mRNA levels are measured by quantitative PCR (qPCR) and represented as fold change for cells electroporated with SpCas9/sgRNA relative to control cells electroporated in PBS only. As shown in FIG. 1C, FAAH protein levels as measured by Simple Wes were normalized by internal control protein (GAPDH) levels and represented as fold change for cells electroporated with SpCas9/sgRNA relative to untreated control cells.

[0085] FIGS. 2A-2C provide bar graphs quantifying editing efficiency (FIG. 2A), FAAH mRNA levels (FIG. 2B), and FAAH protein levels (FIG. 2C) in cells electroporated with SluCas9 and indicated sgRNAs targeting within or proximal the human FAAH CDS. As shown in FIG. 2A, editing efficiency is measured by TIDE analysis, with guides ranked as described in FIG. 1A. As shown in FIG. 2B, FAAH mRNA levels are measured by qPCR and represented as fold change for cells electroporated with SluCas9/sgRNA relative to control cells electroporated in PBS only. As shown in FIG. 2C, FAAH protein levels as measured by Simple Wes were normalized by internal control protein (GAPDH) levels and represented as fold change for cells electroporated with SluCas9/sgRNA relative to untreated control cells.

[0086] FIGS. 3A-3B provides a bar graph quantifying editing efficiency (FIG. 3A) and FAAH mRNA levels (FIG. 3B) in cells electroporated with SaCas9 and indicated sgRNAs that target the human FAAH CDS. As shown in FIG. 3A, editing efficiency measured by TIDE analysis is shown as frequency of INDELs introducing a frameshift mutation. Guides with cut locations located in intronic regions of FAAH are annotated by asterisk (*) and frameshift INDELs represents the total frequency of INDELs minus the frequency of INDELs that are a multiple of 3. As shown in FIG. 3B, FAAH mRNA levels are measured by quantitative PCR (qPCR) and represented as fold change for cells electroporated with SaCas9/sgRNA relative to control cells electroporated with SaCas9 only.

[0087] FIG. 4 provides a schematic depicting FAAH and FAAH-OUT genomic DNA and location of gRNA target sequences (red) for creating a microdeletion in FAAH-OUT, which are shown relative to both the first exon (Ex1) and second exon (Ex2) of FAAH-OUT, as well as a FAAH-OUT promoter (FOP) and FAAH-OUT conserved (FOC) region.

[0088] FIGS. 5A-5C provide bar graphs quantifying percent genomic DNA with deletion in FAAH-OUT as measured by droplet digital PCR (ddPCR) (FIG. 5A), FAAH mRNA levels (FIG. 5B), and FAAH protein levels (FIG. 5C) in cells electroporated with SpCas9 and indicated dual sgRNAs targeting human FAAH-OUT. As shown in FIG. 5B, FAAH mRNA levels are measured by qPCR and represented as fold change for cells electroporated with SpCas9/sgRNAs relative to control cells electroporated with SpCas9 only. As shown in FIG. 5C, FAAH protein levels as measured by Simple Wes were normalized by internal control protein (GAPDH) levels and represented as fold change for cells electroporated with SpCas9/sgRNAs relative to untreated control cells.

[0089] FIG. 6 provides a bar graph quantifying frequency of INDELs measured by TIDE analysis in cells electroporated with SluCas9 and indicated sgRNAs that target human FAAH-OUT. sgRNAs with target sequences upstream or within FOP are shown in red and sgRNAs with target sequences within or downstream FOC are shown in blue.

[0090] FIGS. 7A-7C provide bar graphs quantifying percent genomic DNA with deletion in FAAH-OUT as measured by ddPCR (FIG. 7A), FAAH mRNA levels (FIG. 7B), and FAAH protein levels (FIG. 7C) in cells electroporated with SluCas9 and indicated dual sgRNAs targeting human FAAH-OUT. As shown in FIG. 7B, FAAH mRNA levels are measured by qPCR and represented as fold change for cells electroporated with SluCas9/sgRNAs relative to control cells electroporated with SluCas9 only. As shown in FIG. 7C, FAAH protein levels as measured by Simple Wes were normalized by internal control protein (GAPDH) levels and represented as fold change for cells electroporated with SluCas9/sgRNAs relative to untreated control cells.

[0091] FIGS. 8A-8B provide bar graphs quantifying percent genomic DNA with deletion in FAAH-OUT as measured by ddPCR (FIG. 8A) and FAAH mRNA levels (FIG. 8B) in cells electroporated with SaCas9 and indicated dual sgRNAs targeting human FAAH-OUT. As shown in FIG. 8B, FAAH mRNA levels are measured by qPCR and represented as fold change for cells electroporated with SaCas9/sgRNAs relative to control cells electroporated with SaCas9 only.

[0092] FIGS. 9A-9C provide bar graphs quantifying editing efficiency (FIG. 9A), FAAH mRNA levels (FIG. 9B), and FAAH protein levels (FIG. 9C) in cells electroporated with a subset of SpCas9 SaCas9 sgRNAs targeting within or proximal the human FAAH coding sequence (CDS). As shown in FIG. 9A, editing efficiency is measured by TIDE analysis, with guides ranked based on frequency of insertions or deletions (INDELs) that are expected to result in a frameshift mutation (“Frameshift INDELs”). Guides with cut locations located in intronic regions of FAAH are annotated by asterisk (*) and frameshift INDELs represents the total frequency of INDELs minus the frequency of INDELs that are a multiple of 3. As shown in FIG. 9B, FAAH mRNA levels are measured by quantitative PCR (qPCR) and represented as fold change for cells electroporated with SpCas9/sgRNA relative to control cells electroporated in PBS only. As shown in FIG. 9C, FAAH protein levels as measured by Simple Wes were normalized by internal control protein (GAPDH) levels and represented as fold change for cells electroporated with SpCas9/sgRNA relative to untreated control cells.

### DETAILED DESCRIPTION

### Overview

[0093] The present disclosure is based, at least in part, on the identification of gene editing approaches to modulate FAAH, for example, to treat a subject having a disorder or condition associated with chronic pain. In some aspects, the disclosure provides methods and compositions of gene editing, for example, based on a CRISPR/Cas system described herein, for introducing a gene-edit that results in modulated (e.g., decreased) expression and/or enzymatic activity of FAAH. In some embodiments, the disclosure provides nucleic acid molecules encoding components of a CRISPR/Cas system (e.g., gRNAs, a nucleic acid encoding a Cas nuclease, recombinant expression vector(s) encoding one or more gRNAs, a site-directed endonuclease, or both), for use in introducing a gene edit in a subject that results in modulated (e.g., decreased) expression and/or enzymatic activity of FAAH.

[0094] In some aspects, the disclosure provides methods and compositions of gene editing for introducing a deletion in a genomic region downstream the FAAH gene, wherein the genomic region comprises the FAAH pseudogene FAAH-OUT. In some embodiments, the disclosure provides a CRISPR/Cas system comprising dual guide RNAs directed to separate target sequences downstream FAAH, wherein combination of a Cas nuclease (e.g., Cas9 nuclease) with a first and a second gRNA mediates an upstream and downstream double-stranded break (DSB) in the genomic DNA molecule, thereby resulting in a deletion of a genomic region comprising a segment of FAAH-OUT. In some embodiments, the deletion results in removal of one or more genetic elements that regulate expression of FAAH and/or FAAH-OUT. For example, in some embodiments, the deletion results in a full or partial removal of a FAAH-OUT transcriptional regulatory element, such as a FAAH-OUT promoter (FOP), wherein the removal results in decreased expression of FAAH-OUT transcript. In some embodiments, the deletion results in a full or partial removal of a FAAH-OUT conserved (FOC) region that is 800 bp or approximately 800 bp in length. As described herein, the FOC region has significant sequence homology (e.g., approximately 70% sequence homology) to a region of the FAAH gene. Moreover, and without being bound by theory, the FOC region comprises one or more microRNA seed sites that are shared with the FAAH gene transcript, such that, for example, the FAAH-OUT gene transcript functions as a decoy mRNA to prevent degradation of the FAAH gene transcript by a microRNA-mediated degradation pathway. Thus, in some embodiments, and without being bound by theory, the FAAH-OUT transcript comprising a FOC region functions to extend the longevity and/or translation efficiency of the FAAH transcript, and removal of the FOC region from the FAAH-OUT transcript results in a more rapid degradation of the FAAH transcript.

[0095] Accordingly, the disclosure provides systems of gene editing (e.g., a CRISPR/Cas system) engineered to introduce a deletion resulting in at least a partial removal of FAAH-OUT, wherein the deletion results in reduced FAAH expression and/or activity. In some embodiments, the disclosure provides dual gRNAs for use with a CRISPR/Cas system, wherein when combined with a site-directed endonuclease (e.g., a Cas9 nuclease) in a cell or a population of cells, the dual gRNAs introduce a deletion of about 2 kb to about 10 kb resulting in at least a partial removal of FAAH-OUT. In some aspects the deletion is about 2 kb to about 5 kb, about 5 kb to about 8 kb, or about 8 kb to about 10 kb, resulting in at least a partial removal of FAAH-OUT. In some embodiments, the deletion results in a full or partial removal of FOP. In some embodiments, the deletion results in a full or partial removal of FOC. As described herein, a deletion of about 2 kb to about 10 kb (or about 2 kb to about 5 kb, or about 5 kb to about 8 kb, or about 8 kb to about 10 kb) comprising (i) full or partial removal of FOC, and/or (ii) a full or partial removal of FOP results in reduction of FAAH expression (e.g., reduced FAAH mRNA expression and/or FAAH polypeptide expression) by at least about 15% or more (e.g., about 15%, about 20%, about 25%, about 30%, about 35%, about 40%, about 45%, about 50%, or about 55%) compared to an unmodified population of cells. In some embodiments, the disclosure provides dual gRNAs for use with a site-directed endonuclease (e.g., a Cas9 nuclease), wherein dual gRNAs that introduce a deletion of about 2 kb to about 8 kb are more efficient than dual gRNAs that introduce a longer deletion of about 8 kb to about 10 kb. Without being bound by a theory, a combination of gRNAs of the disclosure that introduce a deletion of about 2 kb to about 8 kb when combined with a Cas nuclease described herein are particularly useful in some embodiments, as they introduce a deletion of sufficient length to remove FAAH-OUT regulatory elements (e.g., FOP and FOC) that contribute to FAAH expression, while resulting in an efficient deletion.

[0096] In some aspects, the disclosure provides methods and compositions of gene editing for introducing a mutation (e.g., an insertion or deletion) within or proximal the coding sequence of the FAAH gene, wherein the mutation results in decreased expression of FAAH transcript, decreased expression of FAAH polypeptide, and/or decreased enzymatic activity of FAAH polypeptide. In some embodiments, the disclosure provides gRNA molecules for use with a site-directed endonuclease (e.g., a Cas9 nuclease), wherein the gRNA comprises a spacer sequence corresponding to a target sequence within or proximal the coding sequence of FAAH (e.g., within or proximal exon 1, exon 2, exon 3, or exon 4 of FAAH). In some embodiments, the gRNAs combine with the Cas nuclease to introduce a DSB proximal the target sequence, wherein repair of the DSB introduces an INDEL that disrupts the FAAH ORF and/or removes a FAAH regulatory element (e.g., a splicing element). In some embodiments, the INDEL introduces a frameshift mutation that disrupts the FAAH ORF. In some embodiments, the INDEL introduces a premature stop codon. In some embodiments, the INDEL removes one or more splicing elements necessary for proper splicing of a precursor mRNA (pre-mRNA) transcribed from the FAAH ORF. As described herein, the disclosure provides CRISPR/Cas systems for introducing a mutation within or proximal the FAAH coding sequence in a population of cells, wherein the mutation results in expression of FAAH transcript and/or polypeptide that is decreased by at least about 15% or more (e.g., about 15%, about 20%, about 25%, about 30%, about 35%, about 40%, about 45%, about 50%, about 55%, about 60%, about 65%, about 70%, about 75%, about 80%, about 85%, or about 90%) compared to an unmodified population of cells.

[0097] In some aspects, the disclosure provides gene editing systems and compositions described herein (e.g., a CRISPR/Cas system) for use in gene editing to modulate (e.g., decrease) FAAH expression and/or activity for treatment of various disorders or conditions. In some embodiments, the gene editing systems described herein are used for analgesia (e.g., treatment of chronic pain), treatment of anxiety, and/or treatment of depression in a subject.

[0098] In some aspects, the disclosure provides compositions that are suitable for delivery of the system components for use in, for example, in vivo gene editing. In some embodiments, the disclosure provides nucleic acids encoding a site-directed endonuclease, one or more gRNAs, or both, or recombinant vectors comprising a nucleic acid encoding the site-directed endonuclease, a nucleic acid encoding the one or more gRNAs, or both that are suitable for use in, for example, in vivo editing of a genomic DNA molecule comprising FAAH and/or FAAH-OUT. In some embodiments, the disclosure further provides lipid compositions that are suitable for delivery of the system components for use in in vivo gene editing. In some embodiments, the delivery is suitable for administration (e.g., localized administration) of an in vivo gene editing system described herein to a target cell population and/or target tissue expressing FAAH. For example, in some embodiments, the target cell population are neurons (e.g., sensory neurons) and the target tissue is dorsal root ganglion (DRG) (e.g., lumbar DRG). In some embodiments, the disclosure provides methods for delivery of an in vivo gene editing system described herein to the DRG, wherein the gene-editing is localized to the DRG (e.g., lumbar DRG) and results in modulation of FAAH in the DRG. Without being bound by theory, modulation of FAAH in the DRG (e.g., lumbar DRG) reduces chronic pain, for example, by reducing pain stimuli perceived by sensory neurons located in the DRG.

### Systems for Gene Editing to Modulate FAAH

[0099] The disclosure provides methods and compositions for genome editing that modulate (e.g., decrease) FAAH expression and/or activity. As used herein, human “fatty acid amide hydrolase 1 (FAAH)” or “FAAH polypeptide” refers to a human enzyme that catalyzes hydrolysis of endogenous amidated lipids (e.g., OEA, AEA, PEA) to their corresponding fatty acids, thereby regulating the signaling functions of these molecules. The methods and compositions for genome editing describe herein comprise (i) introducing a deletion encompassing at least a portion of the FAAH-OUT gene, and (ii) introducing a loss of function mutation in the FAAH gene (e.g., within or proximal the FAAH coding sequence).

[0100] In some aspects, the disclosure provides methods and compositions of genome editing of e.g., FAAH and/or FAAH-OUT, using a site-directed endonuclease. Several site-directed endonucleases with capability to edit eukaryotic genomes are known in the art, for example, zinc finger nucleases, transcription activator-like effector nucleases (TALENs), MegaTal, and CRISPR-Cas systems. The CRISPR-Cas system has the advantage of enabling recognition of a genomic target sequence by formation of a ribonucleoprotein complex comprising a Cas nuclease and guide RNA (gRNA). Given gRNAs can be readily and inexpensively designed and evaluated for use with a given Cas nuclease, the CRISPR-Cas system enables a large number of genome targets to be rapidly screened to identify optimal target sites for introducing a desired gene edit (e.g., a mutation in the FAAH coding sequence, e.g., a deletion in FAAH-OUT). Additionally, the CRISPR-Cas system permits the Cas nuclease to combine with gRNAs of different specificity in the same cell, thus enabling the system to introduce multiple gene edits in a single genome.

[0101] The CRISPR-Cas system comprises one or more RNA molecules referred to as a guide RNAs (gRNAs) that direct a site-directed endonuclease that is a Cas nuclease (e.g., a Cas9 nuclease) to specific target sequences in a genomic DNA molecule. The targeting occurs by Watson-Crick base pairing between the gRNA molecule spacer sequence and a target sequence in the genomic DNA molecule. Once bound at a target site, the Cas nuclease cleaves both strands of the genomic DNA molecule, creating a DNA double-stranded break (DSB).

[0102] One requirement for designing a gRNA to a target sequence in the genomic DNA molecule is that the target sequence contain a protospacer adjacent motif (PAM) sequence. The PAM sequence is recognized by the Cas nuclease used in the CRISPR-Cas system. In some embodiments, a Cas nuclease for use in the present disclosure is a Cas9 nuclease from S. pyogenes (SpCas9), wherein the Cas9 nuclease recognizes the PAM sequence NGG (wherein N=A,C,G,T). In some embodiments, a Cas nuclease for use in the present disclosure is a Cas9 nuclease from S. lugdunensis (SluCas9), wherein the Cas9 nuclease recognizes the PAM sequence NNGG (wherein N=A,C,G,T). In some embodiments, a Cas nuclease for use in the present disclosure is a Cas9 nuclease from S. aureus Cas9 (SaCas9), wherein the Cas9 nuclease recognizes the PAM sequence NNGRRT (wherein N=A,C,G,T; and R=A,G).

### I. Gene Editing of FAAH Pseudogene (FAAH-OUT)

[0103] In some embodiments, the disclosure provides a CRISPR-Cas system comprising a site-directed endonuclease and dual gRNAs, wherein a first gRNA targets a first target sequence within the genomic region between the 3′end of FAAH and the FAAH-OUT transcriptional start site, wherein the second gRNA targets a second target sequence upstream exon 3 of FAAH-OUT, wherein the first gRNA and the second gRNA combine with the site-directed endonuclease (e.g., Cas9 nuclease) to introduce a pair of DSBs, i.e., the first DSB proximal the first target sequence and the second DSB proximal the second target sequence, thereby resulting in a deletion of at least a portion of FAAH-OUT in the genomic DNA molecule.

[0104] The human FAAH-OUT gene is located immediately downstream of FAAH on human chromosome 1. As used herein, the term “FAAH-OUT” or “FAAH pseudogene” encompasses the genomic region that includes FAAH-OUT regulatory promoters and enhancer sequences, the coding and noncoding intronic sequences (i.e., chr1:46,420,994-46,447,702 of human reference genome Hg38). The FAAH-OUT transcript is approximately 2,845 nt in length. In some embodiments, the FAAH-OUT transcript is a long non-coding RNA. The predicted translation product of FAAH-OUT is a protein of approximately 166 amino acid residues in length.

[0105] Certain therapeutic effects of a genomic deletion in FAAH-OUT are known in the art. For example, a microdeletion in FAAH-OUT was reported in a patient with clinical symptoms that included pain insensitivity, a non-anxious disposition, and fast wound healing, as described in WO2019158909 and Habib, et al (2019) BRITISH JOURNAL OF ANAESTHESIA 123:e249, each of which are incorporated herein by reference. The phenotype of the patient included diminished levels of FAAH protein and elevated levels of certain fatty acid amides degraded by FAAH, including AEA.

[0106] As used herein, the “PT microdeletion” refers to the reported ˜8 kb microdeletion. The 5′ end of the PT microdeletion is approximately 5.1 kb downstream the 3′ end of FAAH (3′ end of FAAH located at 46,413,575 of human chromosome 1, according to human reference genome Hg38). Moreover, the 5′ end of the PT microdeletion occurs upstream the FAAH-OUT transcriptional start site (TSS; 46,422,994 of human chromosome 1, according to human reference genome Hg38) and the 3′ end of the PT microdeletion is downstream the second exon of FAAH-OUT. Specifically, the 5′ end of the PT microdeletion is located at approximately 46,418,743 (e.g., ±50 bp, ±100 bp, ±200 bp, ±300 bp, ±400 bp, ±500 bp, ±600 bp) of human chromosome 1, according to human reference genome Hg38. The 3′end of the PT microdeletion is located at approximately 46,426,873 (e.g., ±50 bp, ±100 bp, ±200 bp, ±300 bp, ±400 bp, ±500 bp, ±600 bp) of human chromosome 1, according to human reference genome Hg38.

[0107] In some embodiments, the disclosure provides a genome editing system (e.g., a CRISPR-Cas system) for introducing a deletion comprising at least a portion of FAAH-OUT. In some embodiments, the genome editing system introduces a deletion in FAAH-OUT that is substantially equivalent in length and/or location relative to the PT microdeletion. For example, in some embodiments, the deletion has the same or similar length to the PT microdeletion (e.g., 8 kb±100 bp, ±200 bp, ±300 bp, ±400 bp, ±500 bp, ±600 bp). In some embodiments, the deletion is shorter than the PT microdeletion, e.g., about 1 kb, about 2 kb, about 3 kb, about 4 kb, about 5 kb, or about 6 kb shorter than the PT microdeletion. In some embodiments, the deletion is longer than the PT microdeletion, e.g., about 1 kb, about 2 kb, or about 3 kb longer than the PT microdeletion. In some embodiments, the deletion comprises a genomic region that is the same or similar to the PT microdeletion (e.g., a region encompassing approximately position 46,418,743 to approximately position 46,426,873 of chromosome 1, according to human reference genome hg38). In some embodiments, the 5′ terminus of the deletion is upstream or downstream (e.g., up to ±1 kb, ±2 kb, ±3 kb) the 5′ terminus of the PT microdeletion. In some embodiments, the 5′ terminus of the deletion is upstream the 5′ terminus of the PT microdeletion by approximately 1 kb, 900 bp, 800 bp, 700 bp, 600 bp, 500 bp, 400 bp, 300 bp, 200 bp, or 100 bp. In some embodiments, the 5′ terminus of the deletion is downstream the 5′ terminus of the PT microdeletion by approximately 100 bp, 200 bp, 300 bp, 400 bp, 500 bp, 600 bp, 700 bp, 800 bp, 900 bp, 1 kb, 1.5 kb, 2 kb, 2.5 kb, 3 kb, 3.5 kb, or 4 kb. In some embodiments, the 3′ terminus of the deletion is upstream or downstream (e.g., up to ±1 kb, ±2 kb, ±3 kb) the 3′ terminus of the PT microdeletion. In some embodiments, the 3′ terminus of the deletion is upstream the 3′ terminus of the PT microdeletion by approximately 2.5 kb, 2 kb, 1.5 kb, 1 kb, 900 bp, 800 bp, 700 bp, 600 bp, 500 bp, 400 bp, 300 bp, 200 bp, or 100 bp. In some embodiments, the 3′ terminus of the deletion is downstream the 3′ terminus of the PT microdeletion by approximately 100 bp, 200 bp, 300 bp, 400 bp, 500 bp, 600 bp, 700 bp, 800 bp, 900 bp, 1 kb, 1.5 kb, 2 kb, or 2.5 kb.

[0108] In some embodiments, disclosure provides a genome editing system (e.g., a CRISPR-Cas system) for introducing a deletion, wherein the deletion is at least about 2.0 kb, about 2.5 kb, about 3.0 kb, about 3.5 kb, about 4.0 kb, about 4.5 kb, about 5.0 kb, about 5.5 kb, about 6.0 kb, about 6.5 kb, about 7.0 kb, about 7.5 kb, about 8.0 kb, about 8.5 kb, or about 9.0 kb.

[0109] In some embodiments, the 5′ end of the deletion is between about 46,417,743 and about 46,419,743, according to human reference genome Hg38. In some embodiments, the 3′ end of the deletion is between about 46,425,873 and about 46,427,873, according to human reference genome Hg38.

[0110] In some embodiments, the deletion is of sufficient length to result in full or partial removal of one or more transcriptional regulatory elements of FAAH-OUT. In some embodiments, the transcriptional regulatory element that is removed by the deletion regulates expression of FAAH-OUT. In some embodiments, the transcriptional regulatory element is about 100 bp, about 150 bp, about 200 bp, about 250 bp, about 300 bp, about 350 bp, about 400 bp, about 450 bp, about 500 bp, about 550 bp, about 600 bp, about 650 bp, about 700 bp, about 750 bp, about 800 bp, about 850 bp, about 900 bp, about 950 bp, or about 1000 bp upstream the FAAH-OUT transcriptional start site. In some embodiments, the transcriptional regulatory element is about 100 bp, 200 bp, 300 bp, 400 bp, 500 bp, 600 bp, 700 bp, 800 bp, 900 bp, or 1000 bp in length. Methods of determining promoter regions that correspond to a target gene are known in the art, and include, for example, use of computational algorithms to predict promoter regions of a given target gene. Furthermore, methods to determine promoter activity are also known in the art, and include, for example, measuring expression of a reporter gene from the promoter of interest.

[0111] In some embodiments, the deletion results in partial removal of the transcriptional regulatory element. In some embodiments, the deletion results in full removal of the transcriptional regulatory element. In some embodiments, full or partial removal of the transcriptional regulatory element is sufficient to reduce FAAH-OUT expression, FAAH expression, or both.

[0112] In some embodiments, the transcriptional regulatory element is a FAAH-OUT promoter (FOP). As used herein, “FAAH-OUT promoter” or “FOP” refers to a genomic region that is located approximately 300 bp (e.g. ±50 bp, ±60 bp, ±70 bp, ±80 bp, ±90 bp, ±100 bp, ±150 bp) upstream the FAAH-OUT TSS. The 5′end of FOP is located at approximately 46,422,536 (e.g. ±50 bp, ±60 bp, ±70 bp, ±80 bp, ±90 bp, ±100 bp, ±150 bp) of human chromosome 1, according to human reference genome Hg38. The 3′end of FOP is located at approximately 46,422-695 (e.g. ±50 bp, ±60 bp, ±70 bp, ±80 bp, ±90 bp, ±100 bp, ±150 bp) of human chromosome 1, according to human reference genome Hg38. Without being bound by theory, FOP comprises a transcriptional regulatory element that promotes transcription of the FAAH-OUT coding sequence.

[0113] In some embodiments, the deletion introduced in FAAH-OUT according to the disclosure results in full removal of FOP. In some embodiments, the deletion results in partial removal of FOP. In some embodiments, full or partial removal of FOP results in decreased expression of FAAH-OUT transcript, FAAH transcript, or both. In some embodiments, full or partial removal of FOP results in decreased expression of FAAH polypeptide.

[0114] In some embodiments, the deletion is of sufficient length to result in full or partial removal of a FAAH-OUT conserved (FOC) region. As used herein, “FAAH-OUT′conserved region”, “FOC region”, or “FOC” each refer to a genomic region of approximately 800 bp (e.g., ±10 bp, ±20 bp, ±30 bp, ±40 bp, ±50 bp, ±60 bp, ±70 bp, ±80 bp, ±90 bp, ±100 bp) located within FAAH-OUT that shares approximately 70% (e.g., 63%, 64%, 65%, 66%, 67%, 68%, 69%, 70%, 71%, 72%, 73%, 74%, 75%, 76%, 77%) sequence identity with a genomic region located in FAAH. The 5′end of FOC is located at approximately 46,424,520 (e.g. ±50 bp, ±60 bp, ±70 bp, ±80 bp, ±90 bp, ±100 bp, ±150 bp) of human chromosome 1, according to human reference genome Hg38. The 3′end of FOC is located at approximately 46,425,325 (e.g. ±50 bp, ±60 bp, ±70 bp, ±80 bp, ±90 bp, ±100 bp, ±150 bp) of human chromosome 1, according to reference genome Hg38. Without being bound by theory, a transcript of the FOC region comprises one or more microRNA binding site that is shared with the FAAH transcript, wherein the FOC region of a FAAH-OUT transcript functions as a decoy for microRNAs target the FAAH transcript, thereby preventing and/or reduce microRNA-directed degradation of the FAAH transcript.

[0115] In some embodiments, the deletion introduced in FAAH-OUT according to the disclosure results in full removal of the FOC region. In some embodiments, the deletion results in partial removal of the FOC region. In some embodiments, full or partial removal of the FOC region results in decreased expression of FAAH-OUT transcript, FAAH transcript, or both. In some embodiments, full or partial removal of FOC results in decreased expression of FAAH polypeptide.

[0116] In some embodiments, the deletion comprising at least a portion of FAAH-OUT is sufficient to reduce expression of FAAH transcript and/or polypeptide by one or more mechanisms. In some embodiments, the deletion in FAAH-OUT results in (i) removal of genomic sequence comprising one or more transcriptional regulatory elements that contribute to transcription of FAAH (e.g., an enhancer sequence); (ii) reduced expression of a FAAH-OUT transcript that contributes to expression of FAAH polypeptide; (iii) prevents expression of a FAAH-OUT polypeptide that contributes to FAAH expression and/or enzymatic activity; (iv) results in mis-splicing of FAAH transcript, thereby producing a non-functional FAAH transcript; (v) or a combination of (i)-(iv).

[0117] In some embodiments, the deletion comprising a portion of FAAH-OUT results in (i) a genomic DNA molecule deficient in a transcriptional regulatory element that enables or promotes FAAH-OUT expression; (ii) a genomic DNA molecule with reduced rate of transcription of FAAH mRNA; (iii) a reduced amount of FAAH mRNA transcript; (iv) increased rate of degradation of FAAH mRNA transcript; (v) a reduced amount of FAAH polypeptide product; or (vi) any combination of (i)-(v).

[0118] II. Gene Editing of FAAH

[0119] In some aspects, the disclosure provides methods of gene editing to modulate (e.g., decrease) FAAH expression and/or activity by introducing a mutation within or proximal the FAAH coding sequence, wherein the mutation disrupts the FAAH ORF. As used herein, the term “FAAH gene” or “FAAH” encompasses the genomic region that includes FAAH regulatory promoters and enhancer sequences and the coding sequence (i.e., corresponding to approximately chr1:46,392,317-46,415,848 of human reference genome Hg38). The FAAH 5′UTR corresponds to chr1:46,394,317-46,394,348, the coding sequence corresponds to chr1: 46,394,349-46,413,575; and the 3′UTR corresponds to chr1:46,413,576-46,413,845, each according to human reference genome Hg38.

[0120] In some embodiments, the disclosure provides a CRISPR-Cas system comprising a site-directed endonuclease (e.g., Cas nuclease) and a gRNA, wherein the gRNA targets a target sequence within or proximal the coding sequence of FAAH, wherein the gRNA combines with the site-directed endonuclease to introduce a DSB proximal the target sequence, wherein repair of the DSB introduces mutation proximal the target sequence, thereby resulting in a mutation that disrupts the FAAH ORF, disrupts expression of FAAH transcript, disrupts expression of FAAH polypeptide, and/or disrupts enzymatic activity of FAAH polypeptide. In some embodiments, the mutation is a substitution, missense, nonsense, insertion, deletion, frameshift, or point mutation.

[0121] In some embodiments, the mutation provides a FAAH allele having: (i) a truncated or an altered open reading frame (ORF) relative to wild-type FAAH; (ii) a decreased rate of transcription relative to wild-type FAAH; (iii) a pre-mRNA transcript with improper splicing relative to a pre-mRNA transcribed from wild-type FAAH; (iv) a reduced amount of mRNA transcript relative to wild-type FAAH; (v) an mRNA transcript with increased rate of degradation and/or decreased half-life compared to wild-type FAAH mRNA; (vi) an mRNA transcript with a decreased rate of translation relative to wild-type FAAH mRNA; (vii) a reduced amount of polypeptide product compared to wild-type FAAH; (viii) a polypeptide product with one or more mutations relative to a wild-type FAAH polypeptide; (ix) a polypeptide with reduced enzymatic activity relative to wild-type FAAH polypeptide; or (x) any combination of (i)-(ix).

[0122] In some embodiments, the disclosure provides genome editing systems (e.g., CRISPR-Cas system) for introducing a mutation in FAAH for modulating FAAH expression and/or activity. In some embodiments, a CRISPR-Cas system is used to introduce a DSB in FAAH, wherein repair of the DSB by an endogenous DNA repair pathway introduces a mutation proximal the gRNA target sequence. In some embodiments, a non-homologous end joining (NHEJ) pathway repairs the DSB induced by the CRISPR-Cas system. NHEJ is an error-prone process in which a few base pairs are added or deleted at the site of the DSB, thereby creating changes to the original DNA sequence that are referred to as INDELs (insertions/deletions). In some embodiments, repair of the DSB introduces an INDEL proximal the target sequence. In some embodiments, the INDEL is at least ±1 nt (e.g., ±1 nt, ±2 nt, ±3 nt, ±4 nt, ±5 nt or more). In some embodiments, an INDELs is generated within the coding sequence of FAAH, or within a regulatory sequence of FAAH, wherein the INDEL results in a loss or change in expression of FAAH.

[0123] In some embodiments, the gRNA target sequence is within the coding sequence of FAAH, and INDELs introduced within the coding sequence of FAAH. In some embodiments, the target sequence is within exon 1, exon 2, exon 3, or exon 4 of FAAH, and INDELs is introduced within exon 1, exon 2, exon 3, or exon 4 of FAAH. In some embodiments, the target sequence is within exon 1 or exon 2 of FAAH, and an INDELs introduced within exon 1 or exon 2 of FAAH

[0124] In some embodiments, the INDELs introduces a mutation in the coding sequence of FAAH (e.g., within exon 1, exon 2, exon 3, or exon 4). In some embodiments, the t mutation results in (i) reduced transcription of FAAH, (ii) reduced or inhibited splicing of a FAAH pre-mRNA, (iii) reduced or inhibited translation of FAAH mRNA, (iv) reduced or inhibited enzymatic activity of FAAH polypeptide, or (v) a combination of (i)-(iv).

[0125] In some embodiments, the INDELs introduce a premature stop codon in the coding sequence of FAAH (e.g., within exon 1, exon 2, exon 3, or exon 4). In some embodiments, the premature stop codon results in a FAAH transcript encoding a FAAH polypeptide with reduced or inhibited enzymatic activity. In some embodiments, the premature stop codon results in a FAAH transcript that is unstable or has reduced half-life, for example, due to a mechanism of nonsense-mediated decay. In some embodiments, the premature stop codon results in reduced levels of FAAH transcript in the cell.

[0126] In some embodiments, the INDEL introduces a frameshift mutation in the coding sequence of FAAH (e.g., within exon 1, exon 2, exon 3, or exon 4). As used herein, a “frameshift mutation” refers to INDELs in the coding sequence of a gene that is not divisible by three, for example, and INDEL of ±1 nt, ±2 nt, ±4 nt, ±5 nt, ±7 nt, ±8 nt, etc, wherein the mutation results in a change in the reading frame of the gene. In some embodiments, the frameshift mutation results in (i) reduced stability of transcript FAAH transcript (e.g., due to a mechanism of nonsense mediated decay) (ii) reduced or inhibited splicing of a FAAH pre-mRNA, (iii) reduced or inhibited translation of FAAH mRNA, (iv) reduced or inhibited enzymatic activity of FAAH polypeptide, or (v) a combination of (i)-(iv).

[0127] In some embodiments, the target sequence is proximal the coding sequence of FAAH. In some embodiments, the target sequence is proximal exon 1, exon 2, exon 3, or exon 4 of FAAH. In some embodiments, the target sequence is proximal exon 1 or exon 2 of FAAH. In some embodiments, the target sequence is within a region upstream or downstream exon 1, exon 2, exon 3, or exon 4 of FAAH. In some embodiments, the target sequence is no more than 10 bp, 15 bp, 20 bp, 25 bp, 30 bp, 35 bp, 40 bp, 45 bp, 50 bp, 55 bp, 60 bp, 65 bp, 70 bp, 75 bp, 80 bp, 85 bp, 90 bp, 95 bp, or 100 bp upstream or downstream exon 1, exon 2, exon 3, or exon 4 of FAAH. In some embodiments, the target sequence is no more than 10 bp, 15 bp, 20 bp, 25 bp, 30 bp, 35 bp, 40 bp, 45 bp, 50 bp, 55 bp, 60 bp, 65 bp, 70 bp, 75 bp, 80 bp, 85 bp, 90 bp, 95 bp, or 100 bp upstream or downstream exon 1 or exon 2 of FAAH.

[0128] In some embodiments, repair of a DSB proximal the targets sequence results in INDELs proximal FAAH coding sequence. In some embodiments, the INDELs are within a regulatory sequence or transcriptional regulatory element of FAAH. In some embodiments, the INDELs are within a FAAH promoter or enhancer element. In some embodiments, the INDEL is within a splicing element of FAAH. In some embodiments, the splicing element is a 5′ splice site, a 3′ splice site, a polypyrimidine tract, a branch point, an exonic splicing enhancer, an intronic splicing enhancer (ISE), an exonic splicing silencer (ESS), or an intronic splicing silencer (ISS). In some embodiments, the INDEL proximal the FAAH coding sequence mutation results in (i) reduced transcription of FAAH, (ii) splicing of a FAAH pre-mRNA resulting in exon skipping, (iii) reduced or inhibited splicing of a FAAH pre-mRNA, (iv) reduced or inhibited translation of FAAH mRNA, (v) reduced or inhibited enzymatic activity of FAAH polypeptide, or (vi) a combination of (i)-(v).

### III. CRISPR/Cas Nuclease Systems

[0129] A. Guide RNA (gRNA)

[0130] Engineered CRISPR/Cas systems comprise at least two components: 1) a guide RNA (gRNA) molecule and 2) a Cas nuclease, which interact to form a gRNA/Cas nuclease complex. In an engineered CRISPR/Cas system, a gRNA/Cas nuclease complex is targeted to a specific target sequence of interest within a target nucleic acid (e.g. a genomic DNA molecule) by generating a gRNA comprising a spacer sequence that binds to the specific target sequence in a complementary fashion. Thus, the spacer provides the targeting function of the gRNA/Cas nuclease complex.

[0131] The spacer sequence is a sequence that defines the target sequence in a target nucleic acid (e.g., genomic DNA molecule comprising FAAH and/or FAAH-OUT). The target nucleic acid is a double-stranded molecule: one strand comprises the target sequence comprising a protospacer sequence adjacent to a PAM sequence and is referred to as the “PAM strand,” and the second strand is referred to as the “non-PAM strand” and is complementary to the PAM strand. Both the gRNA spacer sequence and the target sequence are complementary to the non-PAM strand of the target nucleic acid.

[0132] In some embodiments, the disclosure provides one or more gRNA molecules comprising a spacer sequence that corresponds to a target sequence in a genomic DNA molecule, wherein the genomic DNA molecule comprises FAAH and FAAH-OUT regions. As used herein, the term “corresponding to” a target sequence is used to reference any gRNA spacer sequence that hybridizes to the non-PAM strand of the given target sequence by Watson-Crick base-pairing, wherein the spacer sequence has sufficient complementary to the non-PAM strand of the target sequence, as to enable (i) targeting of a Cas nuclease to the target sequence in the genomic DNA molecule, and/or (ii) facilitate a DNA DSB proximal the target sequence, for example, with a cleavage efficiency that is at least 15%, at least 20%, at least 25%, at least 30%, at least 35%, at least 40%, at least 45%, at least 50%, or higher as measured by INDELs introduced proximal the target sequence. Methods of measuring INDEL formation proximal the target sequence are known in the art, and further described herein.

[0133] In some embodiments, a gRNA of the disclosure comprises a spacer sequence that is shorter than the target sequence in the target nucleic acid (e.g., genomic DNA molecule comprising FAAH and/or FAAH-OUT), for example, up to 1, 2, or 3 nucleotides shorter than the target sequence. In some embodiments, the target sequence is 18, 19, 20, 21, 22, or 23 nt in length, and the spacer sequence is shorter than the target sequence by up to 1, 2, or 3 nucleotides. In some embodiments, a gRNA of the disclosure comprises a spacer sequence that is longer than the target sequence in the target nucleic acid (e.g., genomic DNA molecule comprising FAAH and/or FAAH-OUT), for example, up to 1, 2, or 3 nucleotides longer than the target sequence. In some embodiments, the target sequence is 18, 19, 20, 21, 22, or 23 nt in length, and the spacer sequence is longer than the target sequence by up to 1, 2, or 3 nucleotides.

[0134] In some embodiments, a gRNA of the disclosure comprises a spacer sequence having up to 1, 2, or 3 mismatches relative to the target sequence in the target nucleic acid (e.g., genomic DNA molecule comprising FAAH and/or FAAH-OUT). In some embodiments, the spacer sequence has sufficient complementary to the non-PAM strand of the target sequence to enable targeting of a Cas nuclease to the target sequence in the target nucleic acid molecule and/or to facilitate a DNA DSB proximal the target sequence.

[0135] In some embodiments, the spacer sequence comprises a nucleotide sequence with up to 1, 2, or 3 nucleotides that are not complementary to the non-PAM strand of the target sequence, wherein the spacer sequence has sufficient complementary to the non-PAM strand of the target sequence to target a Cas nuclease to the target sequence in the target nucleic acid. In some embodiments, the spacer comprises 1 nucleotide that is not complementary with the non-PAM strand of the target sequence in the target nucleic acid. In some embodiments, the spacer sequence comprises 2 nucleotides that are not complementary with the non-PAM strand of the target sequence in the target nucleic acid. In some embodiments, the spacer sequence comprises 3 nucleotides that are not complementary with the non-PAM strand of the target sequence in the target nucleic acid.

[0136] In some embodiments, the spacer sequence comprises a nucleotide sequence having up to 1, 2, or 3 nucleotide deletions or substitutions relative to nucleotides located 5′ to 3′ at positions 1, 2, or 3 of the target sequence (e.g., positions 16, 17, 18, 19, 20, 21, 22, 23, 24 or 25 upstream the PAM).

(i) Dual gRNAs Targeting FAAH-OUT

[0137] In some embodiments, the disclosure provides dual gRNAs for use with a site-directed endonuclease (e.g., Cas nuclease) to introduce a deletion in a genomic DNA molecule comprising FAAH-OUT, wherein the deletion results in removal of a portion of FAAH-OUT. In some embodiments, the dual gRNAs comprise (i) a first gRNA molecule comprising a spacer sequence corresponding to a first target sequence which is downstream the 3′ terminus of FAAH and upstream the transcriptional start site of FAAH-OUT in the genomic DNA molecule; and (ii) a second gRNA molecule comprising a spacer sequence corresponding to a second target sequence which is downstream of the FAAH-OUT transcriptional start site in the genomic DNA molecule. In some embodiments, wherein when a system comprising the dual gRNAs is introduced to a cell with a site-directed endonuclease (e.g., Cas nuclease), the first gRNA combines with the site-directed endonuclease to induce cleavage proximal the first target sequence, the second gRNA combines with the site-directed endonuclease to induce cleavage proximal the second target sequence, wherein cleavage proximal the first target sequence and the second target sequence introduce a deletion comprising at least a portion of FAAH-OUT in the genomic DNA molecule.

[0138] In some embodiments, the first gRNA comprises a spacer sequence that corresponds to a first target sequence that is within a region of the genomic DNA molecule that is:

[0139] (i) about 2 kb to about 3 kb, about 2 kb to about 4 kb, about 2 kb to about 5 kb, about 2 kb to about 6 kb, about 2 kb to about 7 kb, about 2 kb to about 8 kb, about 2 kb to about 9 kb, about 2 kb to about 10 kb, about 2 kb to about 11 kb, about 3 kb to about 4 kb, about 3 kb to about 5 kb, about 3 kb to about 6 kb, about 3 kb to about 7 kb, about 3 kb to about 8 kb, about 3 kb to about 9 kb, about 3 kb to about 10 kb, about 3 kb to about 11 kb, about 4 kb to about 5 kb, about 4 kb to about 6 kb, about 4 kb to about 7 kb, about 4 kb to about 8 kb, about 4 kb to about 9 kb, about 4 kb to about 10 kb, about 4 kb to about 11 kb, about 5 kb to about 6 kb, about 5 kb to about 7 kb, about 5 kb to about 8 kb, about 5 kb to about 9 kb, about 5 kb to about 10 kb, about 5 kb to about 11 kb, about 6 kb to about 7 kb, about 6 kb to about 8 kb, about 6 kb to about 9 kb, about 6 kb to about 10 kb, about 6 kb to about 11 kb, about 7 to about 8 kb, about 7 kb to about 9 kb, about 7 kb to about 10 kb, about 7 kb to about 11 kb, about 8 kb to about 9 kb, about 8 kb to about 10 kb, about 8 kb to about 11 kb, about 9 kb to about 10 kb, about 9 kb to about 11 kb, or about 10 kb to about 11 kb downstream the 3′ terminus of FAAH;

[0140] (ii) at least about 2 kb, about 2.1 kb, about 2.2 kb, about 2.3 kb, about 2.4 kb, about 2.5 kb, about 2.6 kb, about 2.7 kb, about 2.8 kb, about 2.9 kb, about 3 kb, about 3.1 kb, about 3.2 kb, about 3.3 kb, about 3.4 kb, about 3.5 kb, about 3.6 kb, 3.7 kb, about 3.8 kb, about 3.9 kb, about 4.0 kb, about 4.1 kb, about 4.2 kb, about 4.3, about 4.4 kb, about 4.5 kb, about 4.6 kb, about 4.7 kb, about 4.8 kb, about 4.9 kb, about 5.0 kb, about 5.1 kb, about 5.2 kb, about 5.3 kb, about 5.4 kb, about 5.5 kb, about 5.6 kb, about 5.7 kb, about 5.8 kb, about 5.9 kb, about 6.0 kb, about 6.1 kb, about 6.2 kb, about 6.3 kb, about 6.4 kb, about 6.5 kb, about 6.6 kb, about 6.7 kb, about 6.8 kb, about 7.1 kb, about 7.2 kb, about 7.3 kb, about 7.4 kb, about 7.5 kb, about 8 kb, about 8.5 kb, about 9 kb, about 9.5 kb, about 10 kb, about 10.5 kb, or about 11 kb downstream the 3′ terminus of FAAH;

[0141] (iii) no more than about 4 kb, about 4.5 kb, about 5 kb, about 5.5 kb, about 6 kb, about 6.5 kb, about 7 kb, about 7 kb, about 7.5 kb, about 8 kb, about 8.5 kb, about 9 kb, about 9.5 kb, about 10 kb, about 10.5 kb, about 11 kb, about 11.5 kb, or about 12 kb downstream the 3′ terminus of FAAH;

[0142] (iv) a combination of (i)-(iii).

[0143] In some embodiments, the first gRNA comprises a spacer sequence that corresponds to a first target sequence that is within a region of the genomic DNA molecule that is:

[0144] (i) at least about 100 bp, about 150 bp, about 200 bp, about 250 bp, about 300 bp, about 350 bp, about 400 bp, about 450 bp, or about 500 bp upstream the transcriptional start site of FAAH-OUT;

[0145] (ii) about 100 bp to about 200 bp, about 100 bp to about 300 bp, about 100 bp to about 400 bp, about 100 bp to about 500 bp, about 200 bp to about 300 bp, about 200 bp to about 400 bp, about 200 bp to about 600 bp, about 300 bp to about 400 bp, about 300 bp to about 500 bp, about 300 bp to about 600 bp, about 300 bp to about 700 bp, about 300 bp to about 800 bp, about 300 bp to about 900 bp, about 400 bp to about 500 bp, about 400 bp to about 600 bp, about 400 bp to about 700 bp, about 400 bp to about 800 bp, about 500 bp to about 900 bp, or about 400 bp to about 1000 bp, about 1.5 kb, about 2 kb, about 2.5 kb, about 3 kb, about 3.5 kb, about 4 kb, about 4.5, or about 5 kb upstream the transcriptional start site of FAAH-OUT;

[0146] (iii) no more than about 1 kb, about 1.5 kb, about 2 kb, about 2.5 kb, about 3 kb, about 3.5 kb, about 4 kb, about 4.5 kb, about 5 kb, or about 5.5. kb upstream the transcriptional start site of FAAH-OUT; or

[0147] (iv) a combination of (i)-(iii).

[0148] In some embodiments, the first gRNA comprises a spacer sequence that corresponds to a first target sequence that is within a region of the genomic DNA molecule that is:

[0149] (i) about 2 kb, about 2.5 kb, about 3 kb, about 3.5 kb, about 4 kb, about 4.5 kb, about 4.6 kb, about 5 kb, about 5.5 kb, about 6 kb, about 6.5 kb, about 7 kb, about 7.5 kb, or about 8 kb, downstream the 3′ terminus of FAAH; and

[0150] (ii) about 0.1 kb, about 0.2 kb, about 0.3 kb, about 0.4 kb, about 0.5 kb, about 0.6 kb, about 0.7 kb, about 0.8 kb, about 0.9 kb, about 1 kb, about 1.5 kb, about 2 kb, about 2.5 kb, about 3 kb, about 3.5 kb, about 4 kb, about 4.5, or about 5 kb upstream the transcriptional start site of FAAH-OUT.

[0151] In some embodiments, the first gRNA comprises a spacer sequence that corresponds to a first target sequence that is

[0152] (i) within a region of the genomic DNA molecule between about 46,416,743 to about 46,420,743 of chromosome 1, according to human reference genome Hg38;

[0153] (ii) within a region of the genomic DNA molecule between about 46,417,743 to about 46,419,743 of chromosome 1, according to human reference genome Hg38;

[0154] (iii) within a region of the genomic DNA molecule between about 46,418,243 to about 46,419,243 of chromosome 1, according to human reference genome Hg38;

[0155] (iv) within a region of the genomic DNA molecule between about 46,418,846 to about 46,422,883 of chromosome 1, according to human reference genome Hg38;

[0156] (v) within a region of the genomic DNA molecule between about 46,418, 096 to about 46,422,633 of chromosome 1, according to human reference genome Hg38;

[0157] (vi) within a region of the genomic DNA molecule between about 46,419.046 to about 46,422,683 of chromosome 1, according to human reference genome Hg38;

[0158] (vii) within a region of the genomic DNA molecule between about 46,418,391 to about 46,421,122 of chromosome 1, according to human reference genome Hg38;

[0159] (viii) within a region of the genomic DNA molecule between about 46,418,141 to about 46,420,972 of chromosome 1, according to human reference genome Hg38;

[0160] (ix) within a region of the genomic DNA molecule between about 46,418,191 to about 46,420,922 of chromosome 1, according to human reference genome Hg38;

[0161] (x) within a region of the genomic DNA molecule between about 46,418,168 to about 46,422,208 of chromosome 1, according to human reference genome Hg38;

[0162] (xi) within a region of the genomic DNA molecule between about 46,418,318 to about 46,422,058 of chromosome 1, according to human reference genome Hg38; or

[0163] (xii) within a region of the genomic DNA molecule between about 46,418,368 to about 46,422,008 of chromosome 1, according to human reference genome Hg38.

[0164] In some embodiments, the first gRNA comprises a spacer sequence that corresponds to a first target sequence that is within a region of the genomic DNA molecule that is upstream or is within a transcriptional regulatory element of FAAH-OUT. In some embodiments, the first gRNA comprises a spacer sequence that corresponds to a first target sequence that is within a region of the genomic DNA molecule that is upstream or within FOP.

[0165] In some embodiments, the first gRNA molecule comprises a spacer sequence that corresponds to a target sequence comprising a NNGG PAM. In some embodiments, the target sequence consists of a nucleotide sequence as set forth in any one of SEQ ID NOs: 551-624. In some embodiments, the first gRNA comprises a spacer sequence comprising a nucleotide sequence as set forth in any one of SEQ ID NOs: 737-810, or a nucleotide sequence having up to 1, 2, or 3 nucleotide substitutions or deletions relative to a nucleotide sequence set forth in any one of SEQ ID NOs: 737-810.

[0166] In some embodiments, the first gRNA molecule comprises a spacer sequence that corresponds to a target sequence comprising an NGG PAM. In some embodiments, the target sequence consists of a nucleotide sequence as set forth in any one of SEQ ID NOs: 181-280. In some embodiments, the first gRNA comprises a spacer sequence comprising a nucleotide sequence as set forth in any one of SEQ ID NOs: 366-465, or a nucleotide sequence having up to 1, 2, or 3 nucleotide substitutions or deletions relative to a nucleotide sequence set forth in any one of SEQ ID NOs: 366-465.

[0167] In some embodiments, the first gRNA molecule comprises a spacer sequence that corresponds to a target sequence comprising a NNGRRT PAM. In some embodiments, the target sequence consists of a nucleotide sequence as set forth in any one of SEQ ID NOs: 923-1024. In some embodiments, the first gRNA comprises a spacer sequence comprising a nucleotide sequence as set forth in any one of SEQ ID NOs: 1095-1196, or a nucleotide sequence having up to 1, 2, or 3 nucleotide substitutions or deletions relative to a nucleotide sequence set forth in any one of SEQ ID NOs: 1095-1196.

[0168] In some embodiments, the second gRNA comprises a spacer sequence that corresponds to a second target sequence that is within a region of the genomic DNA molecule that is:

[0169] (i) at least about 1.5 kb, about 1.6 kb, about 1.7 kb, about 1.8 kb, about 1.9 kb, about 2.0 kb, about 2.1 kb, about 2.2 kb, about 2.3, about 2.4 kb, about 2.5 kb, about 2.6 kb, about 2.7 kb, about 2.8 kb, about 2.9 kb, about 3.0 kb, about 3.1 kb, about 3.2 kb, about 3.3, about 3.4 kb, about 3.5 kb, about 3.6 kb, at least about 3.7 kb, about 3.8 kb, about 3.9 kb, about 4.0 kb, about 4.1 kb, about 4.2 kb, about 4.3, about 4.4 kb, about 4.5 kb, about 4.6 kb, about 4.7 kb, about 4.8 kb, about 4.9 kb, about 5.0 kb, about 5.1 kb, about 5.2 kb, about 5.3 kb, about 5.4 kb, or about 5.5 kb downstream the transcriptional start site of FAAH-OUT;

[0170] (ii) about 2 kb to about 3 kb, about 2 kb to about 4 kb, about 2 kb to about 5 kb, about 2 kb to about 6 kb, about 2 kb to about 7 kb, about 2 kb to about 8 kb, about 3 kb to about 4 kb, about 3 kb to about 5 kb, about 3 kb to about 6 kb, about 3 kb to about 7 kb, about 3 kb to about 8 kb, about 4 kb to about 5 kb, about 4 kb to about 6 kb, about 4 kb to about 7 kb, about 4 kb to about 8 kb, about 5 kb to about 6 kb, about 5 kb to about 7 kb, about 5 kb to about 8 kb, about 6 kb to about 7 kb, about 6 kb to about 8 kb, or about 7 to about 8 kb downstream the transcriptional start site of FAAH-OUT;

[0171] (iii) no more than about 3 kb, about 3.5 kb, about 4 kb, about 4.5 kb, about 5 kb, about 5.5 kb, about 6 kb, about 6.5 kb, about 7 kb, about 7 kb, or about 7.5 kb downstream the transcriptional start site of FAAH-OUT;

[0172] (iv) a combination of (i)-(iii).

[0173] In some embodiments, the second gRNA comprises a spacer sequence that corresponds to a second target sequence that is within a region of the genomic DNA molecule that is:

[0174] (i) at least about 3 kb, about 3.5 kb, about 3.6 kb, about 3.7 kb, about 3.8 kb, about 3.9 kb, about 4.0 kb, about 4.1 kb, about 4.2 kb, about 4.3, about 4.4 kb, about 4.5 kb, about 4.6 kb, about 4.7 kb, about 4.8 kb, about 4.9 kb, about 5.0 kb, about 5.1 kb, about 5.2 kb, about 5.3 kb, about 5.4 kb, about 5.5 kb, about 5.6 kb, about 5.7 kb, about 5.8 kb, about 5.9 kb, about 6.0 kb, about 6.1 kb, about 6.2 kb, about 6.3 kb, about 6.4 kb, about 6.5 kb, about 6.6 kb, about 6.7 kb, about 6.8 kb, about 7.1 kb, about 7.2 kb, about 7.3 kb, about 7.4 kb, or about 7.5 kb upstream the 5′ terminus of exon 3 of FAAH-OUT;

[0175] (ii) about 3 kb to about 4 kb, about 3 kb to about 5 kb, about 3 kb to about 6 kb, about 3 kb to about 7 kb, about 3 kb to about 8 kb, about 4 kb to about 5 kb, about 4 kb to about 6 kb, about 4 kb to about 7 kb, about 4 kb to about 8 kb, about 5 kb to about 6 kb, about 5 kb to about 7 kb, about 5 kb to about 8 kb, about 6 kb to about 7 kb, about 6 kb to about 8 kb, or about 7 to about 8 kb upstream the 5′ terminus of exon 3 of FAAH-OUT;

[0176] (iii) no more than about 4 kb, about 4.5 kb, about 5 kb, about 5.5 kb, about 6 kb, about 6.5 kb, about 7 kb, about 7 kb, about 7.5 kb or about 8 kb upstream the 5′ terminus of exon 3 of FAAH-OUT;

[0177] (iv) a combination of (i)-(iii).

[0178] In some embodiments, the second gRNA comprises a spacer sequence that corresponds to a second target sequence that is

[0179] (i) within a region of the genomic DNA molecule between about 46,424,873 to about 46,428,873 of chromosome 1, according to human reference genome Hg38;

[0180] (ii) within a region of the genomic DNA molecule between about 46,425,873 to about 46,427,873 of chromosome 1, according to human reference genome Hg38;

[0181] (iii) within a region of the genomic DNA molecule between about 46,426,373 to about 46,427,373 of chromosome 1, according to human reference genome Hg38;

[0182] (iv) within a region of the genomic DNA molecule between about 46,424,697 to about 46,426,377 of chromosome 1, according to human reference genome Hg38;

[0183] (v) within a region of the genomic DNA molecule between about 46,424,847 to about 46,426,227 of chromosome 1, according to human reference genome Hg38;

[0184] (vi) within a region of the genomic DNA molecule between about 46,424,897 to about 46,426,177 of chromosome 1, according to human reference genome Hg38;

[0185] (vii) within a region of the genomic DNA molecule between about 46,424,651 to about 46,428,274 of chromosome 1, according to human reference genome Hg38;

[0186] (viii) within a region of the genomic DNA molecule between about 46,424,811 to about 46,428,124 of chromosome 1, according to human reference genome Hg38;

[0187] (ix) within a region of the genomic DNA molecule between about 46,424,851 to about 46,428,074 of chromosome 1, according to human reference genome Hg38;

[0188] (x) within a region of the genomic DNA molecule between about 46,424,887 to about 46,428,508 of chromosome 1, according to human reference genome Hg38;

[0189] (xi) within a region of the genomic DNA molecule between about 46,425,037 to about 46,428,268 of chromosome 1, according to human reference genome Hg38; or

[0190] (xii) within a region of the genomic DNA molecule between about 46,425,087 to about 46,428,308 of chromosome 1, according to human reference genome Hg38

[0191] In some embodiments, the second gRNA comprises a spacer sequence that corresponds to a second target sequence that is within a region of the genomic DNA molecule that is downstream or is within FOC.

[0192] In some embodiments, the second gRNA molecule comprises a spacer sequence that corresponds to a target sequence comprising a NNGG PAM. In some embodiments, the target sequence comprises a nucleotide sequence as set forth in SEQ ID NOs: 625-736. In some embodiments, the second gRNA comprises a spacer sequence comprising a nucleotide sequence as set forth in SEQ ID NOs: 811-922, or a nucleotide sequence having up to 1, 2, or 3 nucleotide substitutions or deletions relative to a nucleotide sequence set forth in any one of SEQ ID NOs: 811-922.

[0193] In some embodiments, the second gRNA molecule comprises a spacer sequence that corresponds to a target sequence comprising a NGG PAM. In some embodiments, the target sequence comprises a nucleotide sequence as set forth in SEQ ID NOs: 281-365. In some embodiments, the second gRNA comprises a spacer sequence comprising a nucleotide sequence as set forth in SEQ ID NOs: 466-550, or a nucleotide sequence having up to 1, 2, or 3 nucleotide substitutions or deletions relative to a nucleotide sequence set forth in any one of SEQ ID NOs: 466-550.

[0194] In some embodiments, the second gRNA molecule comprises a spacer sequence that corresponds to a target sequence comprising a NNGRRT PAM. In some embodiments, the target sequence comprises a nucleotide sequence as set forth in SEQ ID NOs: 1025-1094. In some embodiments, the second gRNA comprises a spacer sequence comprising a nucleotide sequence as set forth in SEQ ID NOs: 1197-1266, or a nucleotide sequence having up to 1, 2, or 3 nucleotide substitutions or deletions relative to a nucleotide sequence set forth in any one of SEQ ID NOs: 1197-1266.

[0195] In some embodiments, the disclosure provides a first gRNA and a second gRNA for use with a site-directed endonuclease (e.g., Cas nuclease) for introducing a deletion in a genomic DNA molecule comprising FAAH-OUT. In some embodiments, the first gRNA comprises a spacer sequence that corresponds to a first target sequence and the second gRNA comprises a spacer sequence that corresponds to a second target sequence.

[0196] In some embodiments, the disclosure provides a first gRNA and a second gRNA for use with a site-directed endonuclease (e.g., Cas nuclease) for introducing an approximately 2 kb to approximately 3 kb, approximately 2 kb to approximately 4 kb, approximately 2 kb to approximately 5 kb, approximately 2 kb to approximately 6 kb, approximately 2 kb to approximately 7 kb, approximately 2 kb to approximately 8 kb, approximately 2 kb to approximately 9 kb, or approximately 2 kb to approximately 10 kb deletion in a genomic DNA molecule comprising FAAH-OUT, wherein the deletion results in a partial removal of FOP and a partial removal of FOC.

[0197] In some embodiments, the disclosure provides a first gRNA and a second gRNA for use with a site-directed endonuclease (e.g., Cas nuclease) for introducing an approximately 2 kb to approximately 3 kb, approximately 2 kb to approximately 4 kb, approximately 2 kb to approximately 5 kb, approximately 2 kb to approximately 6 kb, approximately 2 kb to approximately 7 kb, approximately 2 kb to approximately 8 kb, approximately 2 kb to approximately 9 kb, or approximately 2 kb to approximately 10 kb in a genomic DNA molecule comprising FAAH-OUT, wherein the deletion results in a partial removal of FOP and a full removal of FOC.

[0198] In some embodiments, the disclosure provides a first gRNA and a second gRNA for use with a site-directed endonuclease (e.g., Cas nuclease) for introducing an approximately 2 kb to approximately 3 kb, approximately 2 kb to approximately 4 kb, approximately 2 kb to approximately 5 kb, approximately 2 kb to approximately 6 kb, approximately 2 kb to approximately 7 kb, approximately 2 kb to approximately 8 kb, approximately 2 kb to approximately 9 kb, or approximately 2 kb to approximately 10 kb deletion in a genomic DNA molecule comprising FAAH-OUT, wherein the deletion results in a full removal of FOP and a partial removal of FOC.

[0199] In some embodiments, the disclosure provides a first gRNA and a second gRNA for use with a site-directed endonuclease (e.g., Cas nuclease) for introducing an approximately 2 kb to approximately 3 kb, approximately 2 kb to approximately 4 kb, approximately 2 kb to approximately 5 kb, approximately 2 kb to approximately 6 kb, approximately 2 kb to approximately 7 kb, approximately 2 kb to approximately 8 kb, approximately 2 kb to approximately 9 kb, or approximately 2 kb to approximately 10 kb deletion in a genomic DNA molecule comprising FAAH-OUT, wherein the deletion results in a full removal of FOP and a full removal of FOC.

[0200] In some embodiments, the first gRNA molecule comprises a spacer sequence that corresponds to a first target sequence comprising a NNGG PAM and the second gRNA molecule comprises a spacer sequence that corresponds to a second target sequence comprising a NNGG PAM. In some embodiments, the first target sequence comprises a nucleotide sequence as set forth in any one of SEQ ID NOs: 551-624 and the second target sequence comprise a nucleotide sequence as set forth in any one of SEQ ID NOs: 625-736. In some embodiments, the first gRNA comprises a spacer sequence comprising a nucleotide sequence as set forth in any one of SEQ ID NOs: 737-810 and the second target sequence comprise a nucleotide sequence as set forth in any one of SEQ ID NOs: 811-922.

[0201] In some embodiments, the first gRNA molecule comprises a spacer sequence that corresponds to a first target sequence comprising a NGG PAM and the second gRNA molecule comprises a spacer sequence that corresponds to a second target sequence comprising a NGG PAM. In some embodiments, the first target sequence comprises a nucleotide sequence as set forth in any one of SEQ ID NOs: 181-280 and the second target sequence comprise a nucleotide sequence as set forth in any one of SEQ ID NOs: 281-365. In some embodiments, the first gRNA comprises a spacer sequence comprising a nucleotide sequence as set forth in any one of SEQ ID NOs: 366-465 and the second target sequence comprise a nucleotide sequence as set forth in any one of SEQ ID NOs: 466-550.

[0202] In some embodiments, the first gRNA molecule comprises a spacer sequence that corresponds to a first target sequence comprising a NNGRRT PAM and the second gRNA molecule comprises a spacer sequence that corresponds to a second target sequence comprising a NNGRRT PAM. In some embodiments, the first target sequence comprises a nucleotide sequence as set forth in any one of SEQ ID NOs: 923-1024 and the second target sequence comprise a nucleotide sequence as set forth in any one of SEQ ID NOs: 1025-1094. In some embodiments, the first gRNA comprises a spacer sequence comprising a nucleotide sequence as set forth in any one of SEQ ID NOs: 1095-1196 and the second target sequence comprise a nucleotide sequence as set forth in any one of SEQ ID NOs: 1197-1266.

(ii) gRNAs Targeting FAAH

[0203] In some embodiments, the disclosure provides gRNAs for use with a site-directed endonuclease to introduce a mutation in a genomic molecule comprising FAAH, wherein the mutation is introduced within or proximal the coding sequence of FAAH. In some embodiments, the gRNA molecule comprises a spacer sequence that corresponds to a target sequence that is within or proximal the FAAH coding sequence.

[0204] In some embodiments, the gRNA molecule comprises a spacer sequence that corresponds to a target sequence that is within the coding sequence of FAAH. In some embodiments, the target sequence is located within exon 1, exon 2, exon 3, or exon 4 of FAAH.

[0205] In some embodiments, the target sequence is located within exon 1 of FAAH, e.g., between about position 46,394,317 and about position 46,394,543 of chromosome 1, according to human reference genome Hg38. In some embodiments, the target sequence is located with exon 2 of FAAH, e.g., between about position 46,402,091 and about position 46,402,204 of chromosome 1, according to human reference genome Hg38. In some embodiments, the target sequence is located within exon 3 of FAAH, e.g., between about position 46,405,014 and about position 46,405,148 of human chromosome 1, according to human reference genome Hg38. In some embodiments, the target sequence is located within exon 4 of FAAH, e.g., between about position 46,405,372 and about position 46,405,505 of human chromosome 1, according to human reference genome Hg38.

[0206] In some embodiments, the gRNA molecule comprises a spacer sequence that corresponds to a target sequence that is proximal the coding sequence of FAAH. In some embodiments, the target sequence is proximal exon 1, exon 2, exon 3, or exon 4 of FAAH.

[0207] In some embodiments, the target sequence is located proximal to exon 1 of FAAH. In some embodiments, the 3′ terminus of the target sequence is located about 100 nt, about 90 nt, about 80 nt, about 70 nt, about 60 nt, about 50 nt, about 40 nt, about 30 nt, about 20 nt, or about 10 nt upstream position 46,394,317 of chromosome 1, according to human reference genome Hg38. In some embodiments, the 5′ terminus of the target sequence is located about 10 nt, about 20 nt, about 30 nt, about 40 nt, about 50 nt, about 60 nt, about 70 nt, about 80 nt, about 90 nt, or about 100 nt downstream position 46,394,543 of chromosome 1, according to human reference genome Hg38.

[0208] In some embodiments, the target sequence is located proximal to exon 2 of FAAH. In some embodiments, the 3′ terminus of the target sequence is located about 100 nt, about 90 nt, about 80 nt, about 70 nt, about 60 nt, about 50 nt, about 40 nt, about 30 nt, about 20 nt, or about 10 nt upstream position 46,402,091 of chromosome 1, according to human reference genome Hg38. In some embodiments, the 5′ terminus of the target sequence is located about 10 nt, about 20 nt, about 30 nt, about 40 nt, about 50 nt, about 60 nt, about 70 nt, about 80 nt, about 90 nt, or about 100 nt downstream position 46,402,204 of chromosome 1, according to human reference genome Hg38.

[0209] In some embodiments, the target sequence is located proximal to exon 3 of FAAH. In some embodiments, the 3′ terminus of the target sequence is located about 100 nt, about 90 nt, about 80 nt, about 70 nt, about 60 nt, about 50 nt, about 40 nt, about 30 nt, about 20 nt, or about 10 nt upstream position 46,405,014 of chromosome 1, according to human reference genome Hg38. In some embodiments, the 5′ terminus of the target sequence is located about 10 nt, about 20 nt, about 30 nt, about 40 nt, about 50 nt, about 60 nt, about 70 nt, about 80 nt, about 90 nt, or about 100 nt downstream position 46,405,148 of chromosome 1, according to human reference genome Hg38.

[0210] In some embodiments, the target sequence is located proximal to exon 4 of FAAH. In some embodiments, the 3′ terminus of the target sequence is located about 100 nt, about 90 nt, about 80 nt, about 70 nt, about 60 nt, about 50 nt, about 40 nt, about 30 nt, about 20 nt, or about 10 nt upstream position 46,405,372 of chromosome 1, according to human reference genome Hg38. In some embodiments, the 5′ terminus of the target sequence is located about 10 nt, about 20 nt, about 30 nt, about 40 nt, about 50 nt, about 60 nt, about 70 nt, about 80 nt, about 90 nt, or about 100 nt downstream position 46,405,505 of chromosome 1, according to human reference genome Hg38.

[0211] In some embodiments, the gRNA molecule comprises a spacer sequence that corresponds to a target sequence comprising a NNGG PAM. In some embodiments, the target sequence comprises a nucleotide sequence as set forth in any one of SEQ ID NOs: 69-108. In some embodiments, the gRNA comprises a spacer sequence comprising a nucleotide sequence as set forth in any one of SEQ ID NOs: 109-148, or a nucleotide sequence having up to 1, 2, or 3 nucleotide substitutions or deletions relative to a nucleotide sequence set forth in any one of SEQ ID NOs: 109-148.

[0212] In some embodiments, the gRNA molecule comprises a spacer sequence that corresponds to a target sequence comprising a NGG PAM. In some embodiments, the target sequence comprises a nucleotide sequence as set forth in any one of SEQ ID NOs: 1-34. In some embodiments, the gRNA comprises a spacer sequence comprising a nucleotide sequence as set forth in any one of SEQ ID NOs: 35-68, or a nucleotide sequence having up to 1, 2, or 3 nucleotide substitutions or deletions relative to a nucleotide sequence set forth in any one of SEQ ID NOs: 35-68.

[0213] In some embodiments, the gRNA molecule comprises a spacer sequence that corresponds to a target sequence comprising a NNGRRT PAM. In some embodiments, the target sequence comprises a nucleotide sequence as set forth in any one of SEQ ID NOs: 149-164. In some embodiments, the gRNA comprises a spacer sequence comprising a nucleotide sequence as set forth in any one of SEQ ID NOs: 165-180, or a nucleotide sequence having up to 1, 2, or 3 nucleotide substitutions or deletions relative to a nucleotide sequence set forth in any one of SEQ ID NOs: 165-180.

(iii) Methods of gRNA Selection

[0214] In some embodiments, the disclosure provides gRNA spacer sequences that target specific regions of the genome, e.g., a region within or proximal the FAAH coding sequence, e.g., a region within or proximal FAAH-OUT, that are designed in silico by locating targets sequences (e.g., a 19, 20, 21, 22 bp sequence) adjacent to a PAM sequence in the genomic region of interest.

[0215] In some embodiments, the target sequence is adjacent to a PAM recognized by a Cas nuclease (e.g., Cas9 nuclease) described herein. In some embodiments, 3′ end of the target sequence is adjacent to or within 1, 2, or 3 nucleotide of the PAM. The length and the sequence of the PAM depends on the Cas9 nuclease used. For example, in some embodiments, the PAM is selected from a consensus PAM sequence or a particular PAM sequence recognized by a specific Cas9 nuclease, including those disclosed in FIG. 1 of Ran et al., (2015) Nature, 520:186-191 (2015), which is incorporated herein by reference.

[0216] In some embodiments, the PAM comprises 2, 3, 4, 5, 6, 7, 8, 9, or 10 nucleotides in length. Non-limiting exemplary PAM sequences include NGG (SpCas9 WT, SpCas9 nickase, dimeric dCas9-Fok1, SpCas9-HF1, SpCas9 K855A, eSpCas9 (1.0), eSpCas9 (1.1)), NGAN or NGNG (SpCas9 VQR variant), NGAG (SpCas9 EQR variant), NGCG (SpCas9 VRER variant), NAAG (SpCas9 QQR1 variant), NNGRRT or NNGRRN (SaCas9), NNNRRT (KKH SaCas9), NNNNRYAC (CjCas9), NNAGAAW (St1Cas9), NAAAAC (TdCas9), NGGNG (St3Cas9), NG (FnCas9), NAAAAN (TdCas9), NNAAAAW (StCas9), NNNNACA (CjCas9), GNNNCNNA (PmCas9), NNGG (SluCas9), and NNNNGATT (NmCas9) (see e.g., Cong et al., (2013) Science 339:819-823; Kleinstiver et al., (2015) Nat Biotechnol 33:1293-1298; Kleinstiver et al., (2015) Nature 523:481-485; Kleinstiver et al., (2016) Nature 529:490-495; Tsai et al., (2014) Nat Biotechnol 32:569-576; Slaymaker et al., (2016) Science 351:84-88; Anders et al., (2016) Mol Cell 61:895-902; Kim et al., (2017) Nat Comm 8:14500; Fonfara et al., (2013) Nucleic Acids Res 42:2577-2590; Garneau et al., (2010) Nature 468:67-71; Magadan et al., (2012) PLoS ONE 7:e40913; Esvelt et al., (2013) Nat Methods 10(11):1116-1121 (wherein N is defined as any nucleotide, W is defined as either A or T, R is defined as a purine (A) or (G), and Y is defined as a pyrimidine (C) or (T)).

[0217] In some embodiments, the PAM sequence is NGG. In some embodiments, the PAM sequence is NNGG. In some embodiments, the PAM is NNGRRT.

[0218] In some embodiments, the nucleotide sequence of the target sequence and the PAM comprises the formula 5′ N₁₉₋₂₁-N-G-G-3′ (SEQ ID NO: 1282), wherein N is any nucleotide, and wherein the three 3′ terminal nucleic acids, N-G-G represent the SpCas9 PAM. In some embodiments, the nucleotide sequence of the target sequence and the PAM comprises the formula 5′ N₁₉₋₂₂-N-N-G-G-3′ (SEQ ID NO: 1283), wherein N is any nucleotide, and wherein the four 3′ terminal nucleic acids, N-N-G-G represent the SluCas9 PAM. In some embodiments, the nucleotide sequence of the target sequence and the PAM comprises the formula 5′ N₁₉₋₂₂-N-N-G-R-R-T-3′ (SEQ ID NO: 1284), wherein N is any nucleotide, and wherein R is a nucleotide comprising the nucleobase adenine (A) or guanine (G), and wherein the six 3′ terminal nucleic acids, N-N-G-R-R-T represent the SaCas9 PAM.

[0219] In some embodiments, a target sequence that perfectly hybridizes with the gRNA spacer sequence occurs only once in a given eukaryotic genomes. In some embodiments, the genome comprises additional sequences that imperfectly hybridize with the gRNA spacer sequence, for example, sequences having one or more mismatches (e.g., 1, 2, 3, 4, or 5 mismatches) and/or bulges, relative to the gRNA spacer sequence. In some embodiments, the genome comprises sequences that hybridize the gRNA spacer sequence that are adjacent a PAM sequence having at least one mismatch relative to the canonical PAM sequence. Such genomic sequences (e.g., target sequences that imperfectly hybridize the gRNA spacer sequence or target sequences comprising a non-canonical PAM sequences) are referred to herein as off-target sites.

[0220] In some embodiments, the a method of in silico screening is used to predict cleavage efficiency of a gRNA spacer sequence at both on-target and off-target sites, thereby allowing selection of a gRNA with high cleavage efficiency at a target sequence in the genome comprising a target gene (e.g., sufficient to achieve a desired genomic edit of FAAH and/or FAAH-OUT), with low or minimal cutting efficiency at off-target sites in the genome (i.e., low or minimal frequency of DNA DSBs occurring at sites other than the selected target sequence).

[0221] As described herein, selection of gRNAs with a favorable off-target profile is critical for use in a therapeutic method of the disclosure, for example, to eliminate or reduce the risk of undesirable chromosomal rearrangements or off-target mutations. In some embodiments, a favorable off-target profile in one that minimizes or eliminates the number of off-target sites and/or the frequency of cutting at these sites. In some embodiments, a favorable off-target profile is one that minimizes or eliminates off-target sites in specific regions of the genome, for example within or proximal to an oncogene.

[0222] As is known in the art, the occurrence of off-target activity can be influenced by a number of factors including similarities and dissimilarities between the target site and various off-target sites, as well as the particular endonuclease used. For example, the ability of a given gRNA to promote cleavage at a target sequence in a genomic DNA molecule relates to, for example, the accessibility of the target sequence, which depends on one or more factors that include the chromatin structure of the genomic DNA molecule and/or proximity to transcription factor binding sites. For example, target sequences located within a region of the genomic DNA molecule having a high condensed chromatin structure are less accessible than target sequences located within a region of the genomic DNA molecule having an open chromatin structure. As a further example, target sequences proximal to a region of the genomic DNA molecule bound by a transcription factor or other regulatory protein may be less accessible than target sequences proximal a region of the genomic DNA molecule that is unbound by regulatory proteins. Moreover, the cell state and type of cell may influence the accessibility of target sequences, for example, by influencing the chromatin structure of genomic DNA.

[0223] In some embodiments, the nucleotide sequence of the spacer is designed or chosen using an algorithm or method known in the art. In some embodiments, the algorithm uses variables to screen for suitable gRNA spacer sequences and corresponding target sequences. Non-limiting examples of such variables include predicted melting temperature of the gRNA sequence, secondary structure formation of the gRNA sequence, predicted annealing temperature of the gRNA sequence, sequence identity, genomic context of the target sequence, chromatin accessibility of the target sequence, % GC, frequency of genomic occurrence of the target sequence (e.g., of sequences that are identical or are similar but vary in one or more spots as a result of mismatch, insertion or deletion), methylation status of the target sequence, and/or presence of SNPs within the target sequence.

[0224] In some embodiments, one or more bioinformatics tools known in the art are used to predict the off-target activity of a gRNA spacer sequence and/or identify the most likely sites of off-target activity. Non-limiting examples of bioinformatics tools for use in the present disclosure include CCTop, CRISPOR, and COSMID.

[0225] In some embodiments, identification of gRNA target sequences is best achieved through a combination of in silico selection and experimental evaluation. Experimental methods to evaluate, for example, gRNA on-target and off-target cleavage efficiency are known in the art and further described herein.

[0226] In some embodiments, cleavage efficiency is measured as frequency of INDELs proximal the target sequence targeted by the gRNA spacer sequence. Methods to measure frequency of INDELs at a particular target sequence in a genome are known in the art. An exemplary method to measure frequency of INDELs at a predicted cut site in a given target sequence comprises, (i) isolation of genomic DNA from the edited cell population and/or tissue, (ii) amplification of the DNA region comprising the target sequence (e.g., by PCR), (iii) sequencing of the amplified DNA region (e.g., by Sanger sequencing), and (iv) determining frequency of INDELs at the predicted cut site by Tracking of Indels decomposition (TIDE) assay, for example, as described by Brinkman, et al (2014) NUCLEIC ACIDS RESEARCH 42:e168. A further exemplary method comprises sequencing of the amplified DNA region by next-generation sequencing (NGS) and analysis of INDEL frequency at the predicted cut site in the target sequence, for example, as described by Bell et al (2014) BMC Genomics 15:1002.

[0227] In some embodiments, cleavage efficiency is measured as the frequency of total sequence reads having an INDEL of at least ±1 nt (e.g, ±1 nt, ±2 nt, ±3 nt, ±4 nt, ±5 nt, ±6 nt, ±7 nt, ±8 nt, or ±9 nt). In some embodiments, a gRNA is selected having cleavage efficiency within a desired target sequence (e.g., target sequence within or proximal the FAAH coding sequence; e.g., a target sequence within or proximal FAAH-OUT) of at least 15%, 20%, 25%, 30%, 35%, 40%, 45%, 50% or higher. In some embodiments, a gRNA is selected having cleavage efficiency of at least 15%. In some embodiments, a gRNA is selected having cleavage efficiency of at least 20%. In some embodiments, a gRNA is selected having cleavage efficiency of at least 25%. In some embodiments, a gRNA is selected having cleavage efficiency of at least 30%. In some embodiments, a gRNA is selected having cleavage efficiency of at least 35%. In some embodiments, a gRNA is selected having cleavage efficiency of at least 40%. In some embodiments, a gRNA is selected having cleavage efficiency of at least 45%. In some embodiments, a gRNA is selected having cleavage efficiency of at least 50%. In some embodiments, a gRNA is selected having cleavage efficiency of at least 55%. In some embodiments, a gRNA is selected having cleavage efficiency of at least 60%. In some embodiments, a gRNA is selected having cleavage efficiency of at least 65%. In some embodiments, a gRNA is selected having cleavage efficiency of at least 70%. In some embodiments, a gRNA is selected having cleavage efficiency of at least 75%. In some embodiments, a gRNA is selected having cleavage efficiency of at least 80%. In some embodiments, a gRNA is selected having cleavage efficiency of at least 85%. In some embodiments, a gRNA is selected having cleavage efficiency of at least 90% or higher. In some embodiments, cleavage efficiency is measured using TIDE analysis as described herein.

(iv) gRNA Components

[0228] A gRNA comprises at least a user-defined targeting domain termed a “spacer” comprising a nucleotide sequence and a CRISPR repeat sequence. In engineered CRISPR/Cas systems, a gRNA/Cas nuclease complex is targeted to a specific target sequence of interest within a target nucleic acid (e.g., a genomic DNA molecule) by generating a gRNA comprising a spacer with a nucleotide sequence that is able to bind to the specific target sequence in a complementary fashion (See Jinek et al., Science, 337, 816-821 (2012) and Deltcheva et al., Nature, 471, 602-607 (2011)). Thus, the spacer provides the targeting function of the gRNA/Cas nuclease complex.

[0229] In naturally-occurring type II-CRISPR/Cas systems, the “gRNA” is comprised of two RNA strands: 1) a CRISPR RNA (crRNA) comprising the spacer and CRISPR repeat sequence, and 2) a trans-activating CRISPR RNA (tracrRNA). In Type II-CRISPR/Cas systems, the portion of the crRNA comprising the CRISPR repeat sequence and a portion of the tracrRNA hybridize to form a crRNA:tracrRNA duplex, which interacts with a Cas nuclease (e.g., Cas9). As used herein, the terms “split gRNA” or “modular gRNA” refer to a gRNA molecule comprising two RNA strands, wherein the first RNA strand incorporates the crRNA function(s) and/or structure and the second RNA strand incorporates the tracrRNA function(s) and/or structure, and wherein the first and second RNA strands partially hybridize.

[0230] Accordingly, in some embodiments, a gRNA provided by the disclosure comprises two RNA molecules. In some embodiments, the gRNA comprises a CRISPR RNA (crRNA) and a trans-activating CRISPR RNA (tracrRNA). In some embodiments, the gRNA is a split gRNA. In some embodiments, the gRNA is a modular gRNA. In some embodiments, the split gRNA comprises a first strand comprising, from 5′ to 3′, a spacer, and a first region of complementarity; and a second strand comprising, from 5′ to 3′, a second region of complementarity; and optionally a tail domain.

[0231] In some embodiments, the crRNA comprises a spacer comprising a nucleotide sequence that is complementary to and hybridizes with a sequence that is complementary to the target sequence on a target nucleic acid (e.g., a genomic DNA molecule). In some embodiments, the crRNA comprises a region that is complementary to and hybridizes with a portion of the tracrRNA.

[0232] In some embodiments, the tracrRNA may comprise all or a portion of a wild-type tracrRNA sequence from a naturally-occurring CRISPR/Cas system. In some embodiments, the tracrRNA may comprise a truncated or modified variant of the wild-type tracr RNA. The length of the tracr RNA may depend on the CRISPR/Cas system used. In some embodiments, the tracrRNA may comprise 5, 6, 7, 8, 9, 10, 11, 12, 13, 14, 15, 16, 17, 18, 19, 20, 25, 30, 40, 50, 60, 70, 80, 90, 100, or more than 100 nucleotides in length. In certain embodiments, the tracrRNA is at least 26 nucleotides in length. In additional embodiments, the tracrRNA is at least 40 nucleotides in length. In some embodiments, the tracrRNA may comprise certain secondary structures, such as, e.g., one or more hairpins or stem-loop structures, or one or more bulge structures.

Single Guide RNA (sgRNA)

[0233] Engineered CRISPR/Cas nuclease systems often combine a crRNA and a tracrRNA into a single RNA molecule, referred to herein as a “single guide RNA” (sgRNA), by adding a linker between these components. Without being bound by theory, similar to a duplexed crRNA and tracrRNA, an sgRNA will form a complex with a Cas nuclease (e.g., Cas9), guide the Cas nuclease to a target sequence and activate the Cas nuclease for cleavage the target nucleic acid (e.g., genomic DNA). Accordingly, in some embodiments, the gRNA may comprise a crRNA and a tracrRNA that are operably linked. In some embodiments, the sgRNA may comprise a crRNA covalently linked to a tracrRNA. In some embodiments, the crRNA and the tracrRNA is covalently linked via a linker. In some embodiments, the sgRNA may comprise a stem-loop structure via base pairing between the crRNA and the tracrRNA. In some embodiments, a sgRNA comprises, from 5′ to 3′, a spacer, a first region of complementarity, a linking domain, a second region of complementarity, and, optionally, a tail domain.

[0234] The sgRNA can comprise a 20 nucleotide spacer sequence at the 5′ end of the sgRNA sequence. The sgRNA can comprise a less than 20 nucleotide spacer sequence at the 5′ end of the sgRNA sequence. The sgRNA can comprise a more than 20 nucleotide spacer sequence at the 5′ end of the sgRNA sequence. The sgRNA can comprise a variable length spacer sequence with 17-30 nucleotides at the 5′ end of the sgRNA sequence as set forth by SEQ ID NOs: 1285, 1286, and 1287.

[0235] The sgRNA can comprise no uracil at the 3′ end of the sgRNA sequence. The sgRNA can comprise one or more uracil at the 3′ end of the sgRNA sequence. For example, the sgRNA can comprise 1 uracil (U) at the 3′ end of the sgRNA sequence. The sgRNA can comprise 2 uracil (UU) at the 3′ end of the sgRNA sequence. The sgRNA can comprise 3 uracil (UUU) at the 3′ end of the sgRNA sequence. The sgRNA can comprise 4 uracil (UUUU) at the 3′ end of the sgRNA sequence. The sgRNA can comprise 5 uracil (UUUUU) at the 3′ end of the sgRNA sequence. The sgRNA can comprise 6 uracil (UUUUUU) at the 3′ end of the sgRNA sequence. The sgRNA can comprise 7 uracil (UUUUUUU) at the 3′ end of the sgRNA sequence. The sgRNA can comprise 8 uracil (UUUUUUUU) at the 3′ end of the sgRNA sequence.

[0236] In some embodiments, the sgRNA comprises unmodified or modified nucleotides. For example, in some embodiments, the sgRNA comprises one or more 2′-O-methyl phosphorothioate nucleotides.

[0237] Spacers

[0238] In some embodiments, the gRNAs provided by the disclosure comprise a spacer sequence. A spacer sequence is a sequence that defines the target site of a target nucleic acid (e.g.: DNA). The target nucleic acid is a double-stranded molecule: one strand comprises the target sequence adjacent to a PAM sequence and is referred to as the “PAM strand,” and the second strand is referred to as the “non-PAM strand” and is complementary to the PAM strand and target sequence. Both gRNA spacer and the target sequence are complementary to the non-PAM strand of the target nucleic acid. In some embodiments, a spacer sequence corresponding to a target sequence adjacent to a PAM sequence is complementary to the non-PAM strand of the target nucleic acid. Thus, in some embodiments, a spacer sequence which corresponds to a target sequence adjacent to a PAM sequence is identical to the PAM strand. The gRNA spacer sequence hybridizes to the complementary strand (e.g.: the non-PAM strand of the target nucleic acid/target site). In some embodiments, the spacer is sufficiently complementary to the complementary strand of the target sequence (e.g.: non-PAM strand), as to target a Cas nuclease to the target nucleic acid. In some embodiments, the spacer is at least 80%, 85%, 90% or 95% complementary to the non-PAM strand of the target nucleic acid. In some embodiments, the spacer is 100% complementary to the non-PAM strand of the target nucleic acid. In some embodiments, the spacer comprises 1, 2, 3, 4, 5, 6 or more nucleotides that are not complementary with the non-PAM strand of the target nucleic acid. In some embodiments, the spacer comprises 1 nucleotide that is not complementary with the non-PAM strand of the target nucleic acid. In some embodiments, the spacer comprises 2 nucleotides that are not complementary with the non-PAM strand of the target nucleic acid.

[0239] In some embodiments, the 5′ most nucleotide of gRNA comprises the 5′ most nucleotide of the spacer. In some embodiments, the spacer is located at the 5′ end of the crRNA. In some embodiments, the spacer is located at the 5′ end of the sgRNA. In some embodiments, the spacer is about 15-50, about 20-45, about 25-40 or about 30-35 nucleotides in length. In some embodiments, the spacer is about 19-22 nucleotides in length. In some embodiments the spacer is about 15, 16, 17, 18, 19, 20, 21, 22, 23, 24, 25, 26, 27, 28, 29 or 30 nucleotides in length. In some embodiments the spacer is 19 nucleotides in length. In some embodiments, the spacer is 20 nucleotides in length, in some embodiments, the spacer is 21 nucleotides in length.

[0240] In some embodiments, the spacer comprises at least one or more modified nucleotide(s) such as those described herein. In some embodiments, the disclosure provides gRNA molecules comprising a spacer which comprise the nucleobase uracil (U), while any DNA encoding a gRNA comprising a spacer comprising the nucleobase uracil (U) will comprise the nucleobase thymine (T) in the corresponding position(s).

### (v) Methods of Making Guide RNAs

[0241] The gRNAs of the present disclosure are produced by a suitable means available in the art, including but not limited to in vitro transcription (IVT), synthetic and/or chemical synthesis methods, or a combination thereof. Enzymatic (IVT), solid-phase, liquid-phase, combined synthetic methods, small region synthesis, and ligation methods are utilized. In one embodiment, the gRNAs are made using IVT enzymatic synthesis methods. Methods of making polynucleotides by IVT are known in the art and are described in International Application PCT/US2013/30062. Accordingly, the present disclosure also includes polynucleotides, e.g., DNA, constructs and vectors are used to in vitro transcribe a gRNA described herein.

[0242] In some aspects, non-natural modified nucleobases are introduced into polynucleotides, e.g., gRNA, during synthesis or post-synthesis. In certain embodiments, modifications are on internucleoside linkages, purine or pyrimidine bases, or sugar. In particular embodiments, the modification is introduced at the terminal of a polynucleotide; with chemical synthesis or with a polymerase enzyme. Examples of modified nucleic acids and their synthesis are disclosed in PCT application No. PCT/US2012/058519. Synthesis of modified polynucleotides is also described in Verma and Eckstein, Annual Review of Biochemistry, vol. 76, 99-134 (1998).

[0243] In some aspects, enzymatic or chemical ligation methods are used to conjugate polynucleotides or their regions with different functional moieties, such as targeting or delivery agents, fluorescent labels, liquids, nanoparticles, etc. Conjugates of polynucleotides and modified polynucleotides are reviewed in Goodchild, Bioconjugate Chemistry, vol. 1(3), 165-187 (1990).

[0244] Certain embodiments of the invention also provide nucleic acids, e.g., vectors, encoding gRNAs described herein. In some embodiments, the nucleic acid is a DNA molecule. In other embodiments, the nucleic acid is an RNA molecule. In some embodiments, the nucleic acid comprises a nucleotide sequence encoding a crRNA. In some embodiments, the nucleotide sequence encoding the crRNA comprises a spacer flanked by all or a portion of a repeat sequence from a naturally-occurring CRISPR/Cas system. In some embodiments, the nucleic acid comprises a nucleotide sequence encoding a tracrRNA. In some embodiments, the crRNA and the tracrRNA is encoded by two separate nucleic acids. In other embodiments, the crRNA and the tracrRNA is encoded by a single nucleic acid. In some embodiments, the crRNA and the tracrRNA is encoded by opposite strands of a single nucleic acid. In other embodiments, the crRNA and the tracrRNA is encoded by the same strand of a single nucleic acid.

[0245] In some embodiments, the gRNAs provided by the disclosure are chemically synthesized by any means described in the art (see e.g., WO/2005/01248). While chemical synthetic procedures are continually expanding, purifications of such RNAs by procedures such as high performance liquid chromatography (HPLC, which avoids the use of gels such as PAGE) tends to become more challenging as polynucleotide lengths increase significantly beyond a hundred or so nucleotides. One approach used for generating RNAs of greater length is to produce two or more molecules that are ligated together.

[0246] In some embodiments, the gRNAs provided by the disclosure are synthesized by enzymatic methods (e.g., in vitro transcription, IVT).

[0247] Various types of RNA modifications can be introduced during or after chemical synthesis and/or enzymatic generation of RNAs, e.g., modifications that enhance stability, reduce the likelihood or degree of innate immune response, and/or enhance other attributes, as described in the art.

### B. Cas Nuclease

[0248] In some embodiments, the disclosure provides compositions and systems (e.g., an engineered CRISPR/Cas system) comprising a site-directed nuclease, wherein the site-directed nuclease is a Cas nuclease. The Cas nuclease may comprise at least one domain that interacts with a guide RNA (gRNA). Additionally, the Cas nuclease are directed to a target sequence by a guide RNA. The guide RNA interacts with the Cas nuclease as well as the target sequence such that, once directed to the target sequence, the Cas nuclease is capable of cleaving the target sequence. In some embodiments, the guide RNA provides the specificity for the cleavage of the target sequence, and the Cas nuclease are universal and paired with different guide RNAs to cleave different target sequences.

[0249] In some embodiments, the CRISPR/Cas system comprise components derived from a Type-I, Type-II, or Type-III system. Updated classification schemes for CRISPR/Cas loci define Class 1 and Class 2 CRISPR/Cas systems, having Types I to V or VI (Makarova et al., (2015) Nat Rev Microbiol, 13(11):722-36; Shmakov et al., (2015) Mol Cell, 60:385-397). Class 2 CRISPR/Cas systems have single protein effectors. Cas proteins of Types II, V, and VI are single-protein, RNA-guided endonucleases, herein called “Class 2 Cas nucleases.” Class 2 Cas nucleases include, for example, Cas9, Cpf1, C2c1, C2c2, and C2c3 proteins. The Cpf1 nuclease (Zetsche et al., (2015) Cell 163:1-13) is homologous to Cas9, and contains a RuvC-like nuclease domain.

[0250] In some embodiments, the Cas nuclease are from a Type-II CRISPR/Cas system (e.g., a Cas9 protein from a CRISPR/Cas9 system). In some embodiments, the Cas nuclease are from a Class 2 CRISPR/Cas system (a single-protein Cas nuclease such as a Cas9 protein or a Cpf1 protein). The Cas9 and Cpf1 family of proteins are enzymes with DNA endonuclease activity, and they can be directed to cleave a desired nucleic acid target by designing an appropriate guide RNA, as described further herein.

[0251] A Type-II CRISPR/Cas system component are from a Type-IIA, Type-IIB, or Type-IIC system. Cas9 and its orthologs are encompassed. Non-limiting exemplary species that the Cas9 nuclease or other components are from include Streptococcus pyogenes, Streptoccoccus lugdunensis, Streptococcus thermophilus, Streptococcus sp., Staphylococcus aureus, Listeria innocua, Lactobacillus gasseri, Francisella novicida, Wolinella succinogenes, Sutterella wadsworthensis, Gamma proteobacterium, Neisseria meningitidis, Campylobacter jejuni, Pasteurella multocida, Fibrobacter succinogene, Rhodospirillum rubrum, Nocardiopsis dassonvillei, Streptomyces pristinaespiralis, Streptomyces viridochromogenes, Streptomyces viridochromogenes, Streptosporangium roseum, Streptosporangium roseum, Alicyclobacillus acidocaldarius, Bacillus pseudomycoides, Bacillus selenitireducens, Exiguobacterium sibiricum, Lactobacillus delbrueckii, Lactobacillus salivarius, Lactobacillus buchneri, Treponema denticola, Microscilla marina, Burkholderiales bacterium, Polaromonas naphthalenivorans, Polaromonas sp., Crocosphaera watsonii, Cyanothece sp., Microcystis aeruginosa, Synechococcus sp., Acetohalobium arabaticum, Ammonifex degensii, Caldicelulosiruptor becscii, Candidatus Desulforudis, Clostridium botulinum, Clostridium difficile, Finegoldia magna, Natranaerobius thermophilus, Pelotomaculum thermopropionicum, Acidithiobacillus caldus, Acidithiobacillus ferrooxidans, Allochromatium vinosum, Marinobacter sp., Nitrosococcus halophilus, Nitrosococcus watsoni, Pseudoalteromonas haloplanktis, Ktedonobacter racemifer, Methanohalobium evestigatum, Anabaena variabilis, Nodularia spumigena, Nostoc sp., Arthrospira maxima, Arthrospira platensis, Arthrospira sp., Lyngbya sp., Microcoleus chthonoplastes, Oscillatoria sp., Petrotoga mobilis, Thermosipho africanus, Streptococcus pasteurianus, Neisseria cinerea, Campylobacter lari, Parvibaculum lavamentivorans, Corynebacterium diphtheria, or Acaryochloris marina. In some embodiments, the Cas9 protein are from Streptococcus pyogenes (SpCas9). In some embodiments, the Cas9 protein is from S. lugdunensis (SluCas9). In some embodiments, the Cas9 protein are from Staphylococcus aureus (SaCas9). In some embodiments, a suitable Cas9 protein for use in the present disclosure is any disclosed in WO2019/183150 and WO2019/118935, each of which is incorporate herein by reference.

[0252] In some embodiments, a suitable Cas9 nuclease for use in the present disclosure is a wild-type SpCas9 nuclease. The terms “wild-type SpCas9 nuclease” and “wild-type SpCas9” refer to a polypeptide having the amino acid sequence of SEQ ID NO: 1268 that forms an active CRISPR/Cas endonuclease system when combined with a suitable gRNA molecule (e.g., a sgRNA molecule comprising the nucleotide sequence set forth by SEQ ID NO: 1267), wherein the system cleaves a genomic DNA molecule proximal a target sequence comprising a SpCas9 PAM sequence (e.g., NGG) that is targeted by the gRNA molecule. In some embodiments, a suitable Cas9 nuclease for use in the present disclosure is a functional derivative of SpCas9 nuclease. In some embodiments, a functional derivative of SpCas9 nuclease for use in the present disclosure is any variant of wild-type SpCas9 nuclease having equivalent or similar functional properties. For example, a functional derivative of SpCas9 is any variant of wild-type SpCas9 that combines with a suitable gRNA molecule (e.g., a sgRNA molecule comprising the nucleotide sequence set forth by SEQ ID NO: 1267) in a cell to cleave a genomic DNA molecule proximal a target sequence comprising a SpCas9 PAM sequence (e.g., NGG) that is targeted by the gRNA molecule. In some embodiments, the functional derivative of SpCas9 nuclease has substantial sequence homology with wild-type SpCas9 (e.g., at least about 80%, about 85%, about 90%, about 95%, about 96%, about 97%, about 98%, or about 99%). In some embodiments, the functional derivative of SpCas9 nuclease has substantially equivalent cleavage efficiency (e.g., as measured by frequency of INDELs at a target site directed by the gRNA) relative to wild-type SpCas9. In some embodiments, a functional derivative of SpCas9 nuclease comprises one or more mutations relative to wild-type SpCas9 that result in increased cleavage efficiency (e.g., as measured by frequency of INDELs at a target site directed by the gRNA) relative to wild-type SpCas9. In some embodiments, a functional derivative of SpCas9 nuclease comprises one or more mutations relative to wild-type SpCas9 that result in increased fidelity, as further described herein. In some embodiments, a functional derivative of SpCas9 nuclease comprises one or more mutations relative to wild-type SpCas9 that result in recognition of a PAM sequence other than the canonical SpCas9 PAM (i.e., NGG). In some embodiments, a functional derivative of SpCas9 nuclease has one or more nuclease domains replaced with a nuclease domain from another site-directed endonuclease (e.g., Cas9 nuclease) relative to wild-type SpCas9. In some embodiments, a functional derivative of SpCas9 is a modified nuclease (e.g., a modified nuclease comprising a nuclear localization domain) relative to wild-type SpCas9, as further described herein.

[0253] In some embodiments, a suitable Cas9 nuclease for use in the present disclosure is a wild-type SluCas9 nuclease. The terms “wild-type SluCas9 nuclease” and “wild-type SluCas9” refer to a polypeptide having the amino acid sequence of SEQ ID NO: 1270 that forms an active CRISPR/Cas endonuclease system when combined with a suitable gRNA molecule (e.g., a sgRNA molecule comprising the nucleotide sequence set forth by SEQ ID NO: 1269), wherein the system cleaves a genomic DNA molecule proximal a target sequence comprising a SluCas9 PAM sequence (e.g., NNGG) that is targeted by the gRNA molecule. In some embodiments, a suitable Cas9 nuclease for use in the present disclosure is a functional derivative of SluCas9 nuclease. In some embodiments, a functional derivative of SluCas9 nuclease for use in the present disclosure is any variant of wild-type SluCas9 nuclease having equivalent or similar functional properties. For example, a functional derivative of SluCas9 is any variant of wild-type SluCas9 that combines with a suitable gRNA molecule (e.g., a sgRNA molecule comprising the nucleotide sequence set forth by SEQ ID NO: 1269) in a cell to cleave a genomic DNA molecule proximal a target sequence comprising a SluCas9 PAM sequence (e.g., NNGG) that is targeted by the gRNA molecule. In some embodiments, the functional derivative of SluCas9 nuclease has substantial sequence homology with wild-type SluCas9 (e.g., at least about 80%, about 85%, about 90%, about 95%, about 96%, about 97%, about 98%, or about 99%). In some embodiments, the functional derivative of SluCas9 nuclease has substantially equivalent cleavage efficiency (e.g., as measured by frequency of INDELs at a target site directed by the gRNA) to wild-type SluCas9. In some embodiments, a functional derivative of SluCas9 nuclease comprises one or more mutations relative to wild-type SluCas9 that result in increased cleavage efficiency (e.g., as measured by frequency of INDELs at a target site directed by the gRNA) relative to wild-type SluCas9. In some embodiments, a functional derivative of SluCas9 nuclease comprises one or more mutations relative to wild-type SluCas9 that result in increased fidelity, as further described herein. In some embodiments, a functional derivative of SluCas9 nuclease comprises one or more mutations relative to wild-type SluCas9 that result in recognition of a PAM sequence other than the canonical SluCas9 PAM (i.e., NNGG). In some embodiments, a functional derivative of SluCas9 nuclease has one or more nuclease domains replaced with a nuclease domain from another site-directed endonuclease (e.g., Cas9 nuclease) relative to wild-type SluCas9. In some embodiments, a functional derivative of SluCas9 is a modified nuclease (e.g., a modified nuclease comprising a nuclear localization domain) relative to wild-type SluCas9, as further described herein.

[0254] In some embodiments, a suitable Cas9 nuclease for use in the present disclosure is a wild-type SaCas9 nuclease. The terms “wild-type SaCas9 nuclease” and “wild-type SaCas9” refer to a polypeptide having the amino acid sequence of SEQ ID NO: 1272 that forms an active CRISPR/Cas endonuclease system when combined with a suitable gRNA molecule (e.g., a sgRNA molecule comprising the nucleotide sequence set forth by SEQ ID NO: 1271), wherein the system cleaves a genomic DNA molecule proximal a target sequence comprising a SaCas9 PAM sequence (e.g., NNGRRT) that is targeted by the gRNA molecule. In some embodiments, a suitable Cas9 nuclease for use in the present disclosure is a functional derivative of SaCas9 nuclease. In some embodiments, a functional derivative of SaCas9 nuclease for use in the present disclosure is any variant of wild-type SaCas9 nuclease having equivalent or similar functional properties. For example, a functional derivative of SaCas9 is any variant of wild-type SaCas9 that combines with a suitable gRNA molecule (e.g., a sgRNA molecule comprising the nucleotide sequence set forth by SEQ ID NO: 1271) in a cell to cleave a genomic DNA molecule proximal a target sequence comprising a SaCas9 PAM sequence (e.g., NNGRRT) that is targeted by the gRNA molecule. In some embodiments, the functional derivative of SaCas9 nuclease has substantial sequence homology with wild-type SaCas9 (e.g., at least about 80%, about 85%, about 90%, about 95%, about 96%, about 97%, about 98%, or about 99%). In some embodiments, the functional derivative of SaCas9 nuclease has substantially equivalent cleavage efficiency (e.g., as measured by frequency of INDELs at a target site directed by the gRNA) to wild-type SaCas9. In some embodiments, a functional derivative of SaCas9 nuclease comprises one or more mutations relative to wild-type SaCas9 that result in increased cleavage efficiency (e.g., as measured by frequency of INDELs at a target site directed by the gRNA) relative to wild-type SaCas9. In some embodiments, a functional derivative of SaCas9 nuclease comprises one or more mutations relative to wild-type SaCas9 that result in increased fidelity, as further described herein. In some embodiments, a functional derivative of SaCas9 nuclease comprises one or more mutations relative to wild-type SaCas9 that result in recognition of a PAM sequence other than the canonical SaCas9 PAM (i.e., NNGRRT). In some embodiments, a functional derivative of SaCas9 nuclease has one or more nuclease domains replaced with a nuclease domain from another site-directed endonuclease (e.g., Cas9 nuclease) relative to wild-type SaCas9. In some embodiments, a functional derivative of SaCas9 is a modified nuclease (e.g., a modified nuclease comprising a nuclear localization domain) relative to wild-type SaCas9, as further described herein.

[0255] In some embodiments, a Cas nuclease comprises more than one nuclease domain. For example, in some embodiments, the Cas9 nuclease comprises at least one RuvC-like nuclease domain (e.g., Cpf1) and at least one HNH-like nuclease domain (e.g., Cas9). In some embodiments, the Cas9 nuclease introduces a DSB in the target sequence. In some embodiments, the Cas9 nuclease is modified to contain only one functional nuclease domain. For example, the Cas9 nuclease is modified such that one of the nuclease domains is mutated or fully or partially deleted to reduce its nucleic acid cleavage activity. In some embodiments, the Cas9 nuclease is modified to contain no functional RuvC-like nuclease domain. In other embodiments, the Cas9 nuclease is modified to contain no functional HNH-like nuclease domain. In some embodiments in which only one of the nuclease domains is functional, the Cas9 nuclease is a nickase that is capable of introducing a single-stranded break (a “nick”) into the target sequence. In some embodiments, a conserved amino acid within a Cas9 nuclease domain is substituted to reduce or alter a nuclease activity. In some embodiments, the Cas nuclease nickase comprises an amino acid substitution in the RuvC-like nuclease domain Exemplary amino acid substitutions in the RuvC-like nuclease domain include D10A (based on the S. pyogenes Cas9 nuclease). In some embodiments, the nickase comprises an amino acid substitution in the HNH-like nuclease domain Exemplary amino acid substitutions in the HNH-like nuclease domain include E762A, H840A, N863A, H983A, and D986A (based on the S. pyogenes Cas9 nuclease). In some embodiments, the nuclease system described herein comprises a nickase and a pair of guide RNAs that are complementary to the sense and antisense strands of the target sequence, respectively. The guide RNAs directs the nickase to target and introduce a DSB by generating a nick on opposite strands of the target sequence (i.e., double nicking). Chimeric Cas9 nucleases are used, where one domain or region of the protein is replaced by a portion of a different protein. For example, a Cas9 nuclease domain is replaced with a domain from a different nuclease such as Fok1. A Cas9 nuclease is a modified nuclease.

[0256] In alternative embodiments, the Cas nuclease is from a Type-I CRISPR/Cas system. In some embodiments, the Cas nuclease is a component of the Cascade complex of a Type-I CRISPR/Cas system. For example, the Cas nuclease is a Cas3 nuclease. In some embodiments, the Cas nuclease is derived from a Type-III CRISPR/Cas system. In some embodiments, the Cas nuclease is derived from Type-IV CRISPR/Cas system. In some embodiments, the Cas nuclease is derived from a Type-V CRISPR/Cas system. In some embodiments, the Cas nuclease is derived from a Type-VI CRISPR/Cas system.

### (i) High Fidelity Variants of Cas Nucleases

[0257] In some embodiments, the disclosure provides a CRISPR/Cas system comprising a Cas nuclease engineered for increased fidelity. As used herein, the term “fidelity” when used in reference to a CRISPR/Cas system comprising a Cas nuclease and gRNA refers to the specificity of the system for a target site in a DNA molecule (e.g., genomic DNA molecule) that is homologous (e.g., perfect match) to the gRNA spacer sequence. In some embodiments, a CRISPR/Cas system with increased fidelity has reduced activity at off-target sites in the DNA molecule, i.e., sites that are an imperfect match to the gRNA spacer sequence.

[0258] In some embodiments, a CRISPR/Cas system of the disclosure comprises a Cas variant (e.g., a SpCas9 functional derivative, a SluCas9 functional derivative, a SaCas9 functional derivative) comprising one or more mutations for increased fidelity. In some embodiments, the one or more mutations result in reduced activity of the CRISPR/Cas system at off-target sites in the DNA molecule, for example, compared to a system comprising an unmodified version of the Cas nuclease (e.g., wild-type SpCas9 nuclease, wild-type SluCas9 nuclease, wild-type SaCas9 nuclease). In some embodiments, the CRISPR/Cas system has substantially equivalent activity for inducing cleavage at an on-target site in the DNA molecule, for example, as compared to the system comprising an unmodified version of the Cas nuclease.

[0259] Methods of making Cas variants with increased fidelity are known in the art. For example, in some embodiments, a method of structure-guided engineering is used to make a Cas variant with increased fidelity.

[0260] In some embodiments, a CRISPR/Cas system described herein comprises a Cas9 nuclease comprising one or more mutations for increased fidelity. In some embodiments, the Cas9 nuclease is derived from S. pyogenes, wherein the Cas nuclease comprises one or more mutations relative to wild-type SpCas9 for increased fidelity. In some embodiments, the Cas9 nuclease is derived from S. aureus, wherein the Cas nuclease comprises one or more mutations relative to wild-type SaCas9 for increased fidelity. In some embodiments, the Cas9 nuclease is derived from S. lugdunensis, wherein the Cas nuclease comprises one or more mutations relative to wild-type SluCas9 for increased fidelity.

[0261] A suitable Cas9 nuclease with increased fidelity for use in the present disclosure includes any one described US2019/0010471; US2018/0142222; U.S. Pat. No. 9,944,912; WO2020/057481; US2019/0177710; US2018/0100148; U.S. Pat. No. 10,526,591; and US20200149020; each of which is incorporated herein by reference in their entirety.

[0262] In some embodiments, a Cas nuclease engineered for increased fidelity reduces cleavage of one or more predicted off-target sites by at least about 10%, at least about 15%, at least about 20%, at least about 25%, at least about 30%, at least about 35%, at least about 40%, at least about 45%, at least about 50%, at least about 55%, at least about 60%, at least about 65%, at least about 70%, at least about 75%, at least about 80%, at least about 85%, at least about 90%, at least about 95%, at least about 100%, at least about 110%, at least about 115%, at least about 120%, at least about 125%, at least about 30%, at least about 135%, at least about 140%, at least about 145%, at least about 150%, at least about 155%, at least about 160%, at least about 165%, at least about 170%, at least about 175%, at least about 180%, at least about 185%, at least about 190%, at least about 195%, or at least about 200%, relative to a Cas nuclease not engineered for increased fidelity (e.g. wild-type Cas nuclease). In some embodiments, a Cas nuclease engineered for increased fidelity reduces cleavage of one or more predicted off-target sites by about 10% to about 200%, about 20% to about 190%, about 30% to about 180%, about 40% to about 170%, about 50% to about 160%, about 60% to about 150%, about 70% to about 140%, about 80% to about 130%, about 90% to about 120%, about 100% to about 110%, relative to a Cas nuclease not engineered for increased fidelity (e.g. wild-type Cas nuclease).

[0263] In some embodiments, cleavage of an off-target or on-target site is determined based on the percentage of INDELs. In some embodiments, the percentage of INDELs generated at one or more off-target sites by a Cas nuclease engineered for increased fidelity is decreased relative to the percentage of INDELs generated by a Cas nuclease not engineered for increased fidelity (e.g., wild-type Cas nuclease).

[0264] In some embodiments, a Cas nuclease engineered for increased fidelity maintains the same level of cleavage at the on-target site, and reduces the cleavage of one or more predicted off-target sites compared to a Cas nuclease not engineered for increased fidelity (e.g., wild-type Cas nuclease).

### C. Exemplary CRISPR/Cas Systems for Gene Editing of FAAH-OUT

[0265] In some embodiments, the disclosure provides a system for use with a NNGG PAM for introducing a deletion in a genomic DNA molecule comprising at least a portion of FAAH-OUT, wherein the system comprises dual gRNAs and a site-directed endonuclease that recognizes an NNGG PAM. In some embodiments, the site-directed endonuclease is a SluCas9 endonuclease or a functional derivative thereof, an mRNA encoding the SluCas9 endonuclease or functional derivative thereof, or a recombinant expression vector comprising a nucleotide sequence encoding the SluCas9 endonuclease or functional derivative thereof. For example, in some embodiments, a functional derivative of SluCas9 endonuclease is one engineered for increased fidelity. In some embodiments, the deletion introduced is approximately 2-8 kb, approximately 2-7 kb, approximately 2-6 kb, approximately 2-5 kb, approximately 2-4 kb, approximately 3-8 kb, approximately 3-7 kb, approximately 3-6 kb, approximately 3-5 kb, approximately 4-8 kb, approximately 4-7 kb, approximately 4-6 kb, approximately 5-8 kb, or approximately 5-7 kb in length. In some embodiments, the deletion comprises a full or partial removal of FOP. In some embodiments, the deletion comprises a full or partial removal of FOC.

[0266] In some embodiments, the dual gRNAs of the system for use with a NNGG PAM comprise a first gRNA molecule. In some embodiments, the first gRNA molecule comprises a spacer sequence corresponding to a first target sequence, wherein the first target sequence is adjacent an NNGG PAM, and wherein the first target sequence is downstream the 3′ terminus of FAAH and upstream a transcriptional start site of FAAH-OUT. In some embodiments, the first target sequence is within a region of the genomic DNA molecule that is: (i) at least about 5.5 kb, about 6 kb, about 6.5 kb, about 7 kb, about 7.5 kb, about 8 kb, about 8.5 kb, about 9 kb, or about 9.5 kb downstream the 3′ terminus of FAAH; (ii) within a region of the genomic DNA molecule that is at least about 200 bp, about 300 bp, about 400 bp, about 500 bp, about 600 bp, about 700 bp, about 800 bp, about 900 bp, about 1 kb, about 2 kb, about 3 kb, or about 4 kb upstream the transcriptional start site of FAAH-OUT; (iii) within a region of the genomic DNA molecule between about 46,418,846 to about 46,422,883 of chromosome 1, according to human reference genome Hg38; or (iv) a combination of (i)-(iii).

[0267] In some embodiments, the dual gRNAs of the system for use with a NNGG PAM comprise a second gRNA molecule. In some embodiments, the second gRNA molecule comprises a spacer sequence corresponding to a second target sequence, wherein the second target sequence is adjacent an NNGG PAM, and wherein the second target sequence is downstream of the FAAH-OUT transcriptional start site and upstream an exon 3 of FAAH-OUT. In some embodiments, the second target sequence is (i) within a region of the genomic DNA molecule that is about 1.8 kb, about 1.9 kb, about 2 kb, about 2.1 kb, about 2.2 kb, about 2.3 kb, about 2.4 kb, about 2.5 kb, about 2.6 kb, about 2.7 kb, about 2.8 kb, about 2.9 kb, about 3 kb, about 3.1 kb, about 3.2 kb, or about 3.3 kb downstream the transcriptional start site of FAAH-OUT; (ii) within a region of the genomic DNA molecule that is about 5.8 kb, about 5.9 kb, about 6 kb, about 6.1 kb, about 6.2 kb, about 6.3 kb, about 6.4 kb, about 6.5 kb, about 6.6 kb, about 6.7 kb, about 6.8 kb, about 6.9 kb, about 7 kb, about 7.1 kb, about 7.2 kb, or about 7.3 kb upstream the 5′ end of exon 3 of FAAH-OUT; (iii) within a region of the genomic DNA molecule between about 46,424,697 to about 46,426,377 of chromosome 1, according to human reference genome Hg38; or (iv) a combination of (i)-(iii).

[0268] In some embodiments, the first gRNA of the system for use with a NNGG PAM, when introduced into a cell with the site-directed endonuclease that recognizes the NNGG PAM, combines with the site-directed endonuclease to induce cleavage proximal the first target sequence with a cleavage efficiency of at least 30%. In some embodiments, cleavage efficiency is measured as the frequency of INDELs induced proximal the target sequence (e.g., by TIDE analysis). In some embodiments, the cleavage efficiency is at least 30%, 35%, 40%, 45%, 50%, 55%, 60%, 65%, 70%, 75%, 80% or higher.

[0269] In some embodiments, the second gRNA of the system for use with a NNGG PAM, when introduced into a cell with the site-directed endonuclease that recognizes the NNGG PAM, combines with the site-directed endonuclease to induce cleavage proximal the first target sequence with a cleavage efficiency of at least 30%. In some embodiments, cleavage efficiency is measured as the frequency of INDELs induced proximal the target sequence (e.g., by TIDE analysis). In some embodiments, the cleavage efficiency is at least 30%, 35%, 40%, 45%, 50%, 55%, 60%, 65%, 70%, 75%, 80% or higher.

[0270] In some embodiments, the disclosure provides a system for use with a NNGG PAM comprising:

[0271] (i) a SluCas9 endonuclease or a functional derivative thereof, an mRNA encoding the SluCas9 endonuclease or functional derivative thereof, or a recombinant expression vector comprising a nucleotide sequence encoding the SluCas9 endonuclease or functional derivative thereof;

[0272] (ii) a first gRNA molecule targeting a target site in the genomic DNA molecule, the first gRNA comprising a first spacer sequence corresponding to a first target sequence consisting of a nucleotide sequence selected from SEQ ID NO: 564 or SEQ ID NO: 579; and

[0273] (iii) a second gRNA molecule targeting a target site in the genomic DNA molecule, the second gRNA comprising a second spacer sequence corresponding to a second target sequence consisting of a nucleotide sequence selected from any one of SEQ ID NOs: 692, 702, 705, 709, 712, and 723, wherein when the system is introduced to the cell, the first gRNA and second gRNA combine with the site-directed endonuclease to induce cleavage proximal the first and second target sequences, to introduce an approximately 5-8 kb deletion in the genomic DNA molecule resulting in a full removal of FOP and a full removal of the FOC region. In some embodiments, the first spacer sequence comprises a nucleotide sequence having up to 1, 2, or 3 nucleotide deletions or substitutions relative to SEQ ID NO: 750 or SEQ ID NO: 765. In some embodiments, the second spacer sequence comprises a nucleotide sequence having up to 1, 2, or 3 nucleotide deletions or substitutions relative to any one of SEQ ID NOs: 878, 888, 891, 895, 898, and 909.

[0274] In some embodiments, the disclosure provides a system for use with a NNGG PAM comprising:

[0275] (i) a SluCas9 endonuclease or a functional derivative thereof, an mRNA encoding the SluCas9 endonuclease or functional derivative thereof, or a recombinant expression vector comprising a nucleotide sequence encoding the SluCas9 endonuclease or functional derivative thereof;

[0276] (ii) a first gRNA molecule targeting a target site in the genomic DNA molecule, the first gRNA comprising a first spacer sequence corresponding to a first target sequence consisting of a nucleotide sequence selected from SEQ ID NO: 564 or SEQ ID NO: 579; and

[0277] (iii) a second gRNA molecule targeting a target site in the genomic DNA molecule, the second gRNA comprising a second spacer sequence corresponding to a second target sequence consisting of a nucleotide sequence selected from any one of SEQ ID NOs: 629, 630, 644, and 676, wherein when the system is introduced to the cell, the first gRNA and second gRNA combine with the site-directed endonuclease to induce cleavage proximal the first and second target sequences, to introduce an approximately 5-8 kb deletion in the genomic DNA molecule resulting in a full removal of FOP and a partial removal of the FOC region. In some embodiments, the first spacer sequence comprises a nucleotide sequence having up to 1, 2, or 3 nucleotide deletions or substitutions relative to SEQ ID NO: 750 or SEQ ID NO: 765. In some embodiments, the second spacer sequence comprises a nucleotide sequence having up to 1, 2, or 3 nucleotide deletions or substitutions relative to any one of SEQ ID NOs: 815, 816, 830, and 862.

[0278] In some embodiments, the disclosure provides a system for use with a NNGG PAM comprising:

[0279] (i) a SluCas9 endonuclease or a functional derivative thereof, an mRNA encoding the SluCas9 endonuclease or functional derivative thereof, or a recombinant expression vector comprising a nucleotide sequence encoding the SluCas9 endonuclease or functional derivative thereof;

[0280] (ii) a first gRNA molecule targeting a target site in the genomic DNA molecule, the first gRNA comprising a first spacer sequence corresponding to a first target sequence consisting of a nucleotide sequence selected from SEQ ID NO: 615 or SEQ ID NO: 621; and

[0281] (iii) a second gRNA molecule targeting a target site in the genomic DNA molecule, the second gRNA comprising a second spacer sequence corresponding to a second target sequence consisting of a nucleotide sequence selected from any one of SEQ ID NOs: 692, 702, 705, 709, 712, 723, wherein when the system is introduced to the cell, the first gRNA and second gRNA combine with the site-directed endonuclease to induce cleavage proximal the first and second target sequences, to introduce an approximately 2-5.5 kb deletion in the genomic DNA molecule resulting in a partial removal of FOP and a full removal of the FOC region. In some embodiments, the first spacer sequence comprises a nucleotide sequence having up to 1, 2, or 3 nucleotide deletions or substitutions relative to SEQ ID NO: 801 or SEQ ID NO: 807. In some embodiments, the second spacer sequence comprises a nucleotide sequence having up to 1, 2, or 3 nucleotide deletions or substitutions relative to any one of SEQ ID NOs: 878, 888, 891, 895, 898, and 909.

[0282] In some embodiments, the disclosure provides a system for use with a NNGG PAM comprising:

[0283] (i) a SluCas9 endonuclease or a functional derivative thereof, an mRNA encoding the SluCas9 endonuclease or functional derivative thereof, or a recombinant expression vector comprising a nucleotide sequence encoding the SluCas9 endonuclease or functional derivative thereof;

[0284] (ii) a first gRNA molecule targeting a target site in the genomic DNA molecule, the first gRNA comprising a first spacer sequence corresponding to a first target sequence consisting of a nucleotide sequence selected from SEQ ID NO: 615 or SEQ ID NO: 621; and

[0285] (iii) a second gRNA molecule targeting a target site in the genomic DNA molecule, the second gRNA comprising a second spacer sequence corresponding to a second target sequence consisting of a nucleotide sequence selected from any one of SEQ ID NOs: 629, 630, 644, and 676, wherein when the system is introduced to the cell, the first gRNA and second gRNA combine with the site-directed endonuclease to induce cleavage proximal the first and second target sequences, to introduce an approximately 2-5.5 kb deletion in the genomic DNA molecule resulting in a partial removal of FOP and a partial removal of the FOC region. In some embodiments, the first spacer sequence comprises a nucleotide sequence having up to 1, 2, or 3 nucleotide deletions or substitutions relative to SEQ ID NO: 801 or SEQ ID NO: 807. In some embodiments, the second spacer sequence comprises a nucleotide sequence having up to 1, 2, or 3 nucleotide deletions or substitutions relative to any one of SEQ ID NOs: 815, 816, 830, and 862.

[0286] In some embodiments, the disclosure provides a system for use with an NGG PAM for introducing a deletion in a genomic DNA molecule comprising at least a portion of FAAH-OUT, wherein the system comprises dual gRNAs and a site-directed endonuclease that recognizes an NGG PAM. In some embodiments, the site-directed endonuclease is a SpCas9 endonuclease or a functional derivative thereof, an mRNA encoding the SpCas9 endonuclease or functional derivative thereof, or a recombinant expression vector comprising a nucleotide sequence encoding the SpCas9 endonuclease or functional derivative thereof. For example, in some embodiments, a functional derivative of SpCas9 endonuclease is one engineered for increased fidelity. In some embodiments, the deletion introduced is approximately 3-10 kb, approximately 3-9 kb, approximately 3-8 kb, approximately 3-7 kb, approximately 3-6 kb, approximately 3-5 kb, approximately 4-10 kb, approximately 4-9 kb, approximately 4-8 kb, approximately 4-7 kb, approximately 4-6 kb, approximately 5-10 kb, approximately 5-9 kb, approximately 5-8 kb, approximately 5-7 kb, approximately 6-10 kb, approximately 6-9 kb, approximately 6-8 kb, or approximately 8-10 kb in length. In some embodiments, the deletion comprises a removal of FOP. In some embodiments, the deletion comprises a full or partial removal of FOC.

[0287] In some embodiments, the dual gRNAs of the system for use with an NGG PAM comprise a first gRNA molecule. In some embodiments, the first gRNA molecule comprises a spacer sequence corresponding to a first target sequence, wherein the first target sequence is adjacent an NGG PAM, and wherein the first target sequence is downstream the 3′ terminus of FAAH and upstream a transcriptional start site of FAAH-OUT. In some embodiments, the first target sequence is: (i) within a region of the genomic DNA molecule that is at least about 4.5 kb, about 5 kb, about 5.5 kb, about 6 kb, about 6.5 kb, about 7 kb, about 7.5 kb, about 7.5 kb, or about 8 kb downstream the 3′ terminus of FAAH; (ii) within a region of the genomic DNA molecule that is at least about 1.5 kb, about 2 kb, about 2.5 kb, about 3 kb, about 3.5, about 4 kb, about 4.5 kb, or about 5 kb upstream the transcriptional start site of FAAH-OUT; (iii) within a region of the genomic DNA molecule between about 46,418,391 to about 46,421,122 of chromosome 1, according to human reference genome Hg38; or (iv) a combination of (i)-(iii).

[0288] In some embodiments, the dual gRNAs of the system for use with an NGG PAM comprise a second gRNA molecule. In some embodiments, the second gRNA molecule comprises a spacer sequence corresponding to a second target sequence, wherein the second target sequence is adjacent an NGG PAM, and wherein the second target sequence is downstream of the FAAH-OUT transcriptional start site and upstream an exon 3 of FAAH-OUT. In some embodiments, the second target sequence is (i) within a region of the genomic DNA molecule that is at least about 1.8 kb, about 1.9 kb, about 2 kb, about 2.5 kb, about 3 kb, about 3.5 kb, about 4 kb, about 4.5 kb, about 5 kb, or about 5.5 kb downstream the transcriptional start site of FAAH-OUT; (ii) within a region of the genomic DNA molecule that is at least about 3.5 k, about 4 kb, about 4.5 kb, about 5 kb, about 5.5 kb, about 6 kb, about 6.5 kb, about 7 kb, or about 7.5 kb upstream the 5′ end of exon 3 of FAAH-OUT; (iii) within a region of the genomic DNA molecule between about 46,424,651 to about 46,428,274 of chromosome 1, according to human reference genome Hg38; or (iv) a combination of (i)-(iii).

[0289] In some embodiments, the first gRNA of the system for use with an NGG PAM, when introduced into a cell with the site-directed endonuclease that recognizes the NGG PAM, combines with the site-directed endonuclease to induce cleavage proximal the first target sequence with a cleavage efficiency of at least 30%. In some embodiments, cleavage efficiency is measured as the frequency of INDELs induced proximal the target sequence (e.g., by TIDE analysis). In some embodiments, the cleavage efficiency is at least 30%, 35%, 40%, 45%, 50%, 55%, 60%, 65%, 70%, 75%, 80%, 85% or higher.

[0290] In some embodiments, the second gRNA of the system for use with a NGG PAM, when introduced into a cell with the site-directed endonuclease that recognizes the NGG PAM, combines with the site-directed endonuclease to induce cleavage proximal the first target sequence with a cleavage efficiency of at least 30%. In some embodiments, cleavage efficiency is measured as the frequency of INDELs induced proximal the target sequence (e.g., by TIDE analysis). In some embodiments, the cleavage efficiency is at least 30%, 35%, 40%, 45%, 50%, 55%, 60%, 65%, 70%, 75%, 80%, 85% or higher.

[0291] In some embodiments, the disclosure provides a system for use with a NGG PAM comprising:

[0292] (i) a SpCas9 endonuclease or a functional derivative thereof, an mRNA encoding the SpCas9 endonuclease or functional derivative thereof, or a recombinant expression vector comprising a nucleotide sequence encoding the SpCas9 endonuclease or functional derivative thereof;

[0293] (ii) a first gRNA molecule targeting a target site in the genomic DNA molecule, the first gRNA comprising a first spacer sequence corresponding to a first target sequence consisting of a nucleotide sequence selected from any one of SEQ ID NOs: 189, 193, and 221; and

[0294] (iii) a second gRNA molecule targeting a target site in the genomic DNA molecule, the second gRNA comprising a second spacer sequence corresponding to a second target sequence consisting of a nucleotide sequence selected from SEQ ID NO: 365, wherein when the system is introduced to the cell, the first gRNA and second gRNA combine with the site-directed endonuclease to induce cleavage proximal the first and second target sequences, to introduce an approximately 8-10 kb deletion in the genomic DNA molecule resulting in a full removal of FOP and a full removal of the FOC region. In some embodiments, the first spacer sequence comprises a nucleotide sequence having up to 1, 2, or 3 nucleotide deletions or substitutions relative to SEQ ID NOs: 374, 378, and 406. In some embodiments, the second spacer sequence comprises a nucleotide sequence having up to 1, 2, or 3 nucleotide deletions or substitutions relative to any one of SEQ ID NO: 550.

[0295] In some embodiments, the disclosure provides a system for use with a NGG PAM comprising:

[0296] (i) a SpCas9 endonuclease or a functional derivative thereof, an mRNA encoding the SpCas9 endonuclease or functional derivative thereof, or a recombinant expression vector comprising a nucleotide sequence encoding the SpCas9 endonuclease or functional derivative thereof;

[0297] (ii) a first gRNA molecule targeting a target site in the genomic DNA molecule, the first gRNA comprising a first spacer sequence corresponding to a first target sequence consisting of a nucleotide sequence selected from any one of SEQ ID NOs: 189, 193, and 221; and

[0298] (iii) a second gRNA molecule targeting a target site in the genomic DNA molecule, the second gRNA comprising a second spacer sequence corresponding to a second target sequence consisting of a nucleotide sequence selected from any one of SEQ ID NOs: 348, 349, 353, and 355, wherein when the system is introduced to the cell, the first gRNA and second gRNA combine with the site-directed endonuclease to induce cleavage proximal the first and second target sequences, to introduce an approximately 5-8 kb deletion in the genomic DNA molecule resulting in a full removal of FOP and a full removal of the FOC region. In some embodiments, the first spacer sequence comprises a nucleotide sequence having up to 1, 2, or 3 nucleotide deletions or substitutions relative to any one of SEQ ID NOs: 374, 378, and 406. In some embodiments, the second spacer sequence comprises a nucleotide sequence having up to 1, 2, or 3 nucleotide deletions or substitutions relative to any one of SEQ ID NO: 533, 534, 538, and 540.

[0299] In some embodiments, the disclosure provides a system for use with a NGG PAM comprising:

[0300] (i) a SpCas9 endonuclease or a functional derivative thereof, an mRNA encoding the SpCas9 endonuclease or functional derivative thereof, or a recombinant expression vector comprising a nucleotide sequence encoding the SpCas9 endonuclease or functional derivative thereof;

[0301] (ii) a first gRNA molecule targeting a target site in the genomic DNA molecule, the first gRNA comprising a first spacer sequence corresponding to a first target sequence consisting of a nucleotide sequence selected from SEQ ID NO: 236; and

[0302] (iii) a second gRNA molecule targeting a target site in the genomic DNA molecule, the second gRNA comprising a second spacer sequence corresponding to a second target sequence consisting of a nucleotide sequence selected from SEQ ID NO: 365, wherein when the system is introduced to the cell, the first gRNA and second gRNA combine with the site-directed endonuclease to induce cleavage proximal the first and second target sequences, to introduce an approximately 5-8 kb deletion in the genomic DNA molecule resulting in a full removal of FOP and a full removal of the FOC region. In some embodiments, the first spacer sequence comprises a nucleotide sequence having up to 1, 2, or 3 nucleotide deletions or substitutions relative to SEQ ID NOs: 421. In some embodiments, the second spacer sequence comprises a nucleotide sequence having up to 1, 2, or 3 nucleotide deletions or substitutions relative to any one of SEQ ID NO: 550.

[0303] In some embodiments, the disclosure provides a system for use with a NGG PAM comprising:

[0304] (i) a SpCas9 endonuclease or a functional derivative thereof, an mRNA encoding the SpCas9 endonuclease or functional derivative thereof, or a recombinant expression vector comprising a nucleotide sequence encoding the SpCas9 endonuclease or functional derivative thereof;

[0305] (ii) a first gRNA molecule targeting a target site in the genomic DNA molecule, the first gRNA comprising a first spacer sequence corresponding to a first target sequence consisting of a nucleotide sequence selected from any one of SEQ ID NOs: 189, 193, and 221; and

[0306] (iii) a second gRNA molecule targeting a target site in the genomic DNA molecule, the second gRNA comprising a second spacer sequence corresponding to a second target sequence consisting of a nucleotide sequence selected from any one of SEQ ID NOs: 290, 302, 306, and 317, wherein when the system is introduced to the cell, the first gRNA and second gRNA combine with the site-directed endonuclease to induce cleavage proximal the first and second target sequences, to introduce an approximately 5-8 kb deletion in the genomic DNA molecule resulting in a full removal of FOP and a partial removal of the FOC region. In some embodiments, the first spacer sequence comprises a nucleotide sequence having up to 1, 2, or 3 nucleotide deletions or substitutions relative to any one of SEQ ID NOs: 374, 378, and 406. In some embodiments, the second spacer sequence comprises a nucleotide sequence having up to 1, 2, or 3 nucleotide deletions or substitutions relative to any one of SEQ ID NO: 475, 487, 491, and 502.

[0307] In some embodiments, the disclosure provides a system for use with a NGG PAM comprising:

[0308] (i) a SpCas9 endonuclease or a functional derivative thereof, an mRNA encoding the SpCas9 endonuclease or functional derivative thereof, or a recombinant expression vector comprising a nucleotide sequence encoding the SpCas9 endonuclease or functional derivative thereof;

[0309] (ii) a first gRNA molecule targeting a target site in the genomic DNA molecule, the first gRNA comprising a first spacer sequence corresponding to a first target sequence consisting of a nucleotide sequence selected from SEQ ID NO: 236; and

[0310] (iii) a second gRNA molecule targeting a target site in the genomic DNA molecule, the second gRNA comprising a second spacer sequence corresponding to a second target sequence consisting of a nucleotide sequence selected from any one of SEQ ID NOs: 348, 349, 353, and 355, wherein when the system is introduced to the cell, the first gRNA and second gRNA combine with the site-directed endonuclease to induce cleavage proximal the first and second target sequences, to introduce an approximately 3-5.5 kb deletion in the genomic DNA molecule resulting in a full removal of FOP and a full removal of the FOC region. In some embodiments, the first spacer sequence comprises a nucleotide sequence having up to 1, 2, or 3 nucleotide deletions or substitutions relative to SEQ ID NOs: 421. In some embodiments, the second spacer sequence comprises a nucleotide sequence having up to 1, 2, or 3 nucleotide deletions or substitutions relative to any one of SEQ ID NOs: 533, 534, 538, and 540.

[0311] In some embodiments, the disclosure provides a system for use with a NGG PAM comprising:

[0312] (i) a SpCas9 endonuclease or a functional derivative thereof, an mRNA encoding the SpCas9 endonuclease or functional derivative thereof, or a recombinant expression vector comprising a nucleotide sequence encoding the SpCas9 endonuclease or functional derivative thereof;

[0313] (ii) a first gRNA molecule targeting a target site in the genomic DNA molecule, the first gRNA comprising a first spacer sequence corresponding to a first target sequence consisting of a nucleotide sequence selected from SEQ ID NO: 236; and

[0314] (iii) a second gRNA molecule targeting a target site in the genomic DNA molecule, the second gRNA comprising a second spacer sequence corresponding to a second target sequence consisting of a nucleotide sequence selected from any one of SEQ ID NOs: 290, 302, 306, and 317, wherein when the system is introduced to the cell, the first gRNA and second gRNA combine with the site-directed endonuclease to induce cleavage proximal the first and second target sequences, to introduce an approximately 3-5.5 kb deletion in the genomic DNA molecule resulting in a full removal of FOP and a partial removal of the FOC region. In some embodiments, the first spacer sequence comprises a nucleotide sequence having up to 1, 2, or 3 nucleotide deletions or substitutions relative to SEQ ID NO: 421. In some embodiments, the second spacer sequence comprises a nucleotide sequence having up to 1, 2, or 3 nucleotide deletions or substitutions relative to any one of SEQ ID NOs: 475, 487, 491, and 502.

[0315] In some embodiments, the disclosure provides a system for use with a NNGRRT PAM for introducing a deletion in a genomic DNA molecule comprising FAAH-OUT, wherein the system comprises dual gRNAs and a site-directed endonuclease that recognizes an NNGRRT PAM. In some embodiments, the site-directed endonuclease is a SaCas9 endonuclease or a functional derivative thereof, an mRNA encoding the SaCas9 endonuclease or functional derivative thereof, or a recombinant expression vector comprising a nucleotide sequence encoding the SaCas9 endonuclease or functional derivative thereof. For example, in some embodiments, a functional derivative of SaCas9 endonuclease is one engineered for increased fidelity. In some embodiments, the deletion introduced is approximately 3-10 kb, approximately 3-9 kb, approximately 3-8 kb, approximately 3-7 kb, approximately 3-6 kb, approximately 3-5 kb, approximately 4-10 kb, approximately 4-9 kb, approximately 4-8 kb, approximately 4-7 kb, approximately 4-6 kb, approximately 5-10 kb, approximately 5-9 kb, approximately 5-8 kb, approximately 5-7 kb, approximately 6-10 kb, approximately 6-9 kb, approximately 6-8 kb, or approximately 8-10 kb in length. In some embodiments, the deletion comprises a removal of FOP. In some embodiments, the deletion comprises a full or partial removal of FOC.

[0316] In some embodiments, the dual gRNAs of the system for use with a NNGRRT PAM comprise a first gRNA molecule. In some embodiments, the first gRNA molecule comprises a spacer sequence corresponding to a first target sequence, wherein the first target sequence is adjacent an NNGRRT PAM, and wherein the first target sequence is downstream the 3′ terminus of FAAH and upstream a transcriptional start site of FAAH-OUT. In some embodiments, the first target sequence is: (i) within a region of the genomic DNA molecule that is at least about 4.5 kb, about 5 kb, about 5.5 kb, about 6 kb, about 6.5 kb, about 7 kb, about 7.5 kb, about 8 kb, about 8.5 kb, or about 9 kb downstream the 3′ terminus of FAAH; (ii) within a region of the genomic DNA molecule that is at least about 0.8 kb, about 0.9 kb, about 1 kb, about 1.5 kb, about 2 kb, about 2.5 kb, about 3 kb, about 3.5, about 4 kb, about 4.5 kb, or about 5 kb upstream the transcriptional start site of FAAH-OUT; (iii) within a region of the genomic DNA molecule between about 46,418,168 to about 46,422,208 of chromosome 1, according to human reference genome Hg38; or (iv) a combination of (i)-(iii).

[0317] In some embodiments, the dual gRNAs of the system for use with a NNGRRT PAM comprise a second gRNA molecule. In some embodiments, the second gRNA molecule comprises a spacer sequence corresponding to a second target sequence, wherein the second target sequence is adjacent an NNGRRT PAM, and wherein the second target sequence is downstream of the FAAH-OUT transcriptional start site and upstream an exon 3 of FAAH-OUT. In some embodiments, the second target sequence is (i) within a region of the genomic DNA molecule that is at least about 1.5 kb, about 2 kb, about 2.5 kb, about 3 kb, about 3.5 kb, about 4 kb, about 4.5 kb, about 5 kb, or about 5.5 kb downstream the transcriptional start site of FAAH-OUT; (ii) within a region of the genomic DNA molecule that is at least about 3.5 kb, about 4 kb, about 4.5 kb, about 5 kb, about 5.5 kb, about 6 kb, about 6.5 kb, about 7 kb, or about 7.5 kb upstream the 5′ end of exon 3 of FAAH-OUT; (iii) within a region of the genomic DNA molecule between about 46,424,887 to about 46,428,508 of chromosome 1, according to human reference genome Hg38; or (iv) a combination of (i)-(iii).

[0318] In some embodiments, the first gRNA of the system for use with a NNGRRT PAM, when introduced into a cell with the site-directed endonuclease that recognizes the NNGRRT PAM, combines with the site-directed endonuclease to induce cleavage proximal the first target sequence with a cleavage efficiency of at least 15%. In some embodiments, cleavage efficiency is measured as the frequency of INDELs induced proximal the target sequence (e.g., by TIDE analysis). In some embodiments, the cleavage efficiency is at least 15%, 20%, 25%, 30%, 35%, 40%, 45%, 50%, 55%, 60%, 65%, 70%, 75%, 80%, 85% or higher.

[0319] In some embodiments, the second gRNA of the system for use with a NNGRRT PAM, when introduced into a cell with the site-directed endonuclease that recognizes the NNGRRT PAM, combines with the site-directed endonuclease to induce cleavage proximal the first target sequence with a cleavage efficiency of at least 15%. In some embodiments, cleavage efficiency is measured as the frequency of INDELs induced proximal the target sequence (e.g., by TIDE analysis). In some embodiments, the cleavage efficiency is at least 15%, 20%, 25%, 30%, 35%, 40%, 45%, 50%, 55%, 60%, 65%, 70%, 75%, 80%, 85% or higher.

[0320] In some embodiments, the disclosure provides a system for use with a NNGRRT PAM comprising:

[0321] (i) a SaCas9 endonuclease or a functional derivative thereof, an mRNA encoding the SaCas9 endonuclease or functional derivative thereof, or a recombinant expression vector comprising a nucleotide sequence encoding the SaCas9 endonuclease or functional derivative thereof;

[0322] (ii) a first gRNA molecule targeting a target site in the genomic DNA molecule, the first gRNA comprising a first spacer sequence corresponding to a first target sequence consisting of a nucleotide sequence selected from any one of SEQ ID NOs: 930, 932, 939, and 942; and

[0323] (iii) a second gRNA molecule targeting a target site in the genomic DNA molecule, the second gRNA comprising a second spacer sequence corresponding to a second target sequence consisting of a nucleotide sequence selected from SEQ ID NO: 1087 or SEQ ID NO: 1092, wherein when the system is introduced to the cell, the first gRNA and second gRNA combine with the site-directed endonuclease to induce cleavage proximal the first and second target sequences, to introduce an approximately 8-10 kb deletion in the genomic DNA molecule resulting in a full removal of FOP and a full removal of the FOC region. In some embodiments, the first spacer sequence comprises a nucleotide sequence having up to 1, 2, or 3 nucleotide deletions or substitutions relative to any one of SEQ ID NOs: 1102, 1104, 1111, and 1114. In some embodiments, the second spacer sequence comprises a nucleotide sequence having up to 1, 2, or 3 nucleotide deletions or substitutions relative to SEQ ID NO: 1259 or SEQ ID NO:1264.

[0324] In some embodiments, the disclosure provides a system for use with a NNGRRT PAM comprising:

[0325] (i) a SaCas9 endonuclease or a functional derivative thereof, an mRNA encoding the SaCas9 endonuclease or functional derivative thereof, or a recombinant expression vector comprising a nucleotide sequence encoding the SaCas9 endonuclease or functional derivative thereof;

[0326] (ii) a first gRNA molecule targeting a target site in the genomic DNA molecule, the first gRNA comprising a first spacer sequence corresponding to a first target sequence consisting of a nucleotide sequence selected from any one of SEQ ID NOs: 930, 932, 939, 942, 947, 949, and 956; and

[0327] (iii) a second gRNA molecule targeting a target site in the genomic DNA molecule, the second gRNA comprising a second spacer sequence corresponding to a second target sequence consisting of a nucleotide sequence of SEQ ID NO: 1073, wherein when the system is introduced to the cell, the first gRNA and second gRNA combine with the site-directed endonuclease to induce cleavage proximal the first and second target sequences, to introduce an approximately 5-8 kb deletion in the genomic DNA molecule resulting in a full removal of FOP and a full removal of the FOC region. In some embodiments, the first spacer sequence comprises a nucleotide sequence having up to 1, 2, or 3 nucleotide deletions or substitutions relative to any one of SEQ ID NOs: 1102, 1104, 1111, 1114, 1119, 1121, and 1128. In some embodiments, the second spacer sequence comprises a nucleotide sequence having up to 1, 2, or 3 nucleotide deletions or substitutions relative to SEQ ID NO: 1245.

[0328] In some embodiments, the disclosure provides a system for use with a NNGRRT PAM comprising:

[0329] (i) a SaCas9 endonuclease or a functional derivative thereof, an mRNA encoding the SaCas9 endonuclease or functional derivative thereof, or a recombinant expression vector comprising a nucleotide sequence encoding the SaCas9 endonuclease or functional derivative thereof;

[0330] (ii) a first gRNA molecule targeting a target site in the genomic DNA molecule, the first gRNA comprising a first spacer sequence corresponding to a first target sequence consisting of a nucleotide sequence selected from any one of SEQ ID NOs: 947, 949, 956, 960, 967, 968, 976, and 980; and

[0331] (iii) a second gRNA molecule targeting a target site in the genomic DNA molecule, the second gRNA comprising a second spacer sequence corresponding to a second target sequence consisting of a nucleotide sequence selected from SEQ ID NO: 1087 or SEQ ID NO: 1092, wherein when the system is introduced to the cell, the first gRNA and second gRNA combine with the site-directed endonuclease to induce cleavage proximal the first and second target sequences, to introduce an approximately 5-8 kb deletion in the genomic DNA molecule resulting in a full removal of FOP and a full removal of the FOC region. In some embodiments, the first spacer sequence comprises a nucleotide sequence having up to 1, 2, or 3 nucleotide deletions or substitutions relative to any one of SEQ ID NOs: 1119, 1121, 1128, 1132, 1139, 1140, 1148, and 1152. In some embodiments, the second spacer sequence comprises a nucleotide sequence having up to 1, 2, or 3 nucleotide deletions or substitutions relative to SEQ ID NO: 1259 or SEQ ID NO: 1264.

[0332] In some embodiments, the disclosure provides a system for use with a NNGRRT PAM comprising:

[0333] (i) a SaCas9 endonuclease or a functional derivative thereof, an mRNA encoding the SaCas9 endonuclease or functional derivative thereof, or a recombinant expression vector comprising a nucleotide sequence encoding the SaCas9 endonuclease or functional derivative thereof;

[0334] (ii) a first gRNA molecule targeting a target site in the genomic DNA molecule, the first gRNA comprising a first spacer sequence corresponding to a first target sequence consisting of a nucleotide sequence selected from any one of SEQ ID NOs: 930, 932, and 939; and

[0335] (iii) a second gRNA molecule targeting a target site in the genomic DNA molecule, the second gRNA comprising a second spacer sequence corresponding to a second target sequence consisting of a nucleotide sequence of SEQ ID NO: 1046, wherein when the system is introduced to the cell, the first gRNA and second gRNA combine with the site-directed endonuclease to induce cleavage proximal the first and second target sequences, to introduce an approximately 5-8 kb deletion in the genomic DNA molecule resulting in a full removal of FOP and a partial removal of the FOC region. In some embodiments, the first spacer sequence comprises a nucleotide sequence having up to 1, 2, or 3 nucleotide deletions or substitutions relative to any one of SEQ ID NOs: 1102, 1104, and 1111. In some embodiments, the second spacer sequence comprises a nucleotide sequence having up to 1, 2, or 3 nucleotide deletions or substitutions relative to SEQ ID NO: 1218.

[0336] In some embodiments, the disclosure provides a system for use with a NNGRRT PAM comprising:

[0337] (i) a SaCas9 endonuclease or a functional derivative thereof, an mRNA encoding the SaCas9 endonuclease or functional derivative thereof, or a recombinant expression vector comprising a nucleotide sequence encoding the SaCas9 endonuclease or functional derivative thereof;

[0338] (ii) a first gRNA molecule targeting a target site in the genomic DNA molecule, the first gRNA comprising a first spacer sequence corresponding to a first target sequence consisting of a nucleotide sequence selected from any one of SEQ ID NOs: 960, 967, 968, 976, and 980; and

[0339] (iii) a second gRNA molecule targeting a target site in the genomic DNA molecule, the second gRNA comprising a second spacer sequence corresponding to a second target sequence consisting of a nucleotide sequence of SEQ ID NO: 1073, wherein when the system is introduced to the cell, the first gRNA and second gRNA combine with the site-directed endonuclease to induce cleavage proximal the first and second target sequences, to introduce an approximately 3-5.5 kb deletion in the genomic DNA molecule resulting in a full removal of FOP and a full removal of the FOC region. In some embodiments, the first spacer sequence comprises a nucleotide sequence having up to 1, 2, or 3 nucleotide deletions or substitutions relative to any one of SEQ ID NOs: 1132, 1139, 1140, 1148, and 1152. In some embodiments, the second spacer sequence comprises a nucleotide sequence having up to 1, 2, or 3 nucleotide deletions or substitutions relative to SEQ ID NO: 1245.

[0340] In some embodiments, the disclosure provides a system for use with a NNGRRT PAM comprising:

[0341] (i) a SaCas9 endonuclease or a functional derivative thereof, an mRNA encoding the SaCas9 endonuclease or functional derivative thereof, or a recombinant expression vector comprising a nucleotide sequence encoding the SaCas9 endonuclease or functional derivative thereof;

[0342] (ii) a first gRNA molecule targeting a target site in the genomic DNA molecule, the first gRNA comprising a first spacer sequence corresponding to a first target sequence consisting of a nucleotide sequence selected from any one of SEQ ID NOs: 942, 947, 949, 956, 960, 967, 968, 976, and 980; and

[0343] (iii) a second gRNA molecule targeting a target site in the genomic DNA molecule, the second gRNA comprising a second spacer sequence corresponding to a second target sequence consisting of a nucleotide sequence of SEQ ID NO: 1046,

[0344] wherein when the system is introduced to the cell, the first gRNA and second gRNA combine with the site-directed endonuclease to induce cleavage proximal the first and second target sequences, to introduce an approximately 3-5.5 kb deletion in the genomic DNA molecule resulting in a full removal of FOP and a partial removal of the FOC region. In some embodiments, the first spacer sequence comprises a nucleotide sequence having up to 1, 2, or 3 nucleotide deletions or substitutions relative to any one of SEQ ID NOs: 1114, 1119, 1121, 1128, 1132, 1139, 1140, 1148, and 1152. In some embodiments, the second spacer sequence comprises a nucleotide sequence having up to 1, 2, or 3 nucleotide deletions or substitutions relative to SEQ ID NO: 1218.

[0345] D. Exemplary CRISPR/Cas Systems for Gene Editing of FAAH In some embodiments, the disclosure provides a system for use with a NNGG PAM for introducing a mutation in a genomic DNA molecule comprising FAAH, wherein the system comprises one or more gRNAs and a site-directed endonuclease that recognizes an NNGG PAM. In some embodiments, the site-directed endonuclease is a SluCas9 endonuclease or a functional derivative thereof, an mRNA encoding the SluCas9 endonuclease or functional derivative thereof, or a recombinant expression vector comprising a nucleotide sequence encoding the SluCas9 endonuclease or functional derivative thereof. For example, in some embodiments, a functional derivative of SluCas9 endonuclease is one engineered for increased fidelity.

[0346] In some embodiments, the disclosure provides a system for use with a NNGG PAM comprising a gRNA molecule, wherein the gRNA molecule comprises a spacer sequence corresponding to a target sequence, wherein the target sequence is within exon 1 or exon 2 of FAAH. In some embodiments, wherein the gRNA is introduced into a cell with a site-directed endonuclease that recognizes an NNGG PAM (e.g., SluCas9 or functional derivative thereof), the gRNA and the site-directed endonuclease combine to introduce a DNA DSB proximal the target sequence (e.g., within exon 1 or exon 2 of FAAH). In some embodiments, repair of the DNA DSB (e.g., by an NEHJ repair pathway) introduces a mutation proximal the target sequence. In some embodiments, the mutation is an INDEL of at least ±1 nt (e.g., ±1, ±2, ±3, ±4, ±5, etc). In some embodiments, the INDEL disrupts the FAAH ORF, for example, by introducing a frameshift mutation in the FAAH coding sequence (e.g., within exon 1 or exon 2 of FAAH), wherein the disruption results in a FAAH transcript having an altered reading frame and/or a FAAH transcript encoding a mutated FAAH polypeptide with reduced or eliminated enzymatic activity. In some embodiments, the INDEL is a point mutation. In some embodiments, the INDEL introduces a premature stop codon in the FAAH coding sequence.

[0347] In some embodiments, the gRNA for use with a site-directed endonuclease that recognizes a NNGG PAM comprises a spacer sequence corresponding to a target sequence consisting of a nucleotide sequence as set forth by any one of SEQ ID NOs: 76, 77, 78, 79, 88, 89, 90, 92, 95, 96, 100, 102, 103, 104, and 107. In some embodiments the gRNA comprises a spacer sequence comprising up to 1, 2, or 3 nucleotide deletions or substitutions relative to any one of SEQ ID NOs: 116, 117, 118, 119, 128, 129, 130, 132, 135, 136, 140, 142, 143, 144, and 147.

[0348] In some embodiments, the target sequence is proximal exon 1 or exon 2 of FAAH. In some embodiments, the 3′ terminus of the target sequence is about 100 nt, about 90 nt, about 80 nt, about 70 nt, about 60 nt, about 50 nt, about 40 nt, about 30 nt, about 20 nt, or about 10 nt upstream the 5′ terminus of exon 1 or exon 2 of FAAH. In some embodiments, the 5′ terminus of the target sequence is about 10 nt, about 20 nt, about 30 nt, about 40 nt, about 50 nt, about 60 nt, about 70 nt, about 80 nt, about 90 nt, or about 100 nt downstream the 3′ terminus of exon 1 or exon 2 of FAAH. In some embodiments, wherein the gRNA is introduced into a cell with a site-directed endonuclease that recognizes an NNGG PAM (e.g., SluCas9), the gRNA and the site-directed endonuclease combine to introduce a DNA DSB proximal the target sequence (e.g., upstream the 5′ terminus of exon 1 or exon 2 of FAAH, e.g., downstream the 3′ terminus of exon 1 or exon 2 of FAAH). In some embodiments, the mutation is an INDEL of at least ±1 nt (e.g., ±1, ±2, ±3, ±4, ±5, etc). In some embodiments, the INDEL disrupts a regulatory sequence of FAAH, wherein the disrupts results in decreased expression of FAAH (e.g., decreased transcription of FAAH, decreased or inhibited splicing of FAAH pre-mRNA, decreased translation of FAAH transcript). In some embodiments, the INDEL disrupts a splicing element of FAAH.

[0349] In some embodiments, the gRNA for use with a site-directed endonuclease that recognizes a NNGG PAM comprises a spacer sequence corresponding to a target sequence consisting of a nucleotide sequence as set forth by any one of SEQ ID NOs: 69, 70, 72, and 93. In some embodiments the gRNA comprises a spacer sequence comprising up to 1, 2, or 3 nucleotide deletions or substitutions relative to any one of SEQ ID NOs: 109, 110, 112, and 133.

[0350] In some embodiments, the gRNA for use with a site-directed endonuclease that recognizes a NNGG PAM (e.g., SluCas9 or functional derivative thereof), when introduced into a population of cells with the site-directed endonuclease, combines with the site-directed endonuclease to introduce a DNA DSB proximal the gRNA target sequence within or proximal the FAAH coding sequence (e.g., exon 1 or exon 2 of FAAH), wherein the cleavage efficiency (e.g., as measured by TIDE analysis) is at least about 15%, about 20%, about 25%, about 30%, about 35%, about 40%, about 45%, about 50%, about 55%, about 60%, about 65%, about 70%, about 75%, about 80%, about 85% or higher. In some embodiments, repair of the DNA DSB introduces a mutation (e.g., an INDEL) resulting in decreased expression of FAAH mRNA (e.g., as measured by qPCR or ddPCR) by at least 15%, at least 20%, at least 25%, at least 30%, at least 35%, at least 40%, at least 45%, at least 50%, at least 55%, at least 60%, at least 65%, at least 70%, or at least 75% or more compared to an unmodified population of cells. In some embodiments, repair of the DNA DSB introduces a mutation (e.g., an INDEL) resulting in decreased expression of FAAH polypeptide (e.g., as measured by western blot) by at least 15%, at least 20%, at least 25%, at least 30%, at least 35%, at least 40%, 45% or more compared to an unmodified population of cells.

[0351] In some embodiments, the disclosure provides a system for use with a NGG PAM for introducing a mutation in a genomic DNA molecule comprising FAAH, wherein the system comprises one or more gRNAs and a site-directed endonuclease that recognizes an NGG PAM. In some embodiments, the site-directed endonuclease is a SpCas9 endonuclease or a functional derivative thereof, an mRNA encoding the SpCas9 endonuclease or functional derivative thereof, or a recombinant expression vector comprising a nucleotide sequence encoding the SpCas9 endonuclease or functional derivative thereof. For example, in some embodiments, a functional derivative of SpCas9 endonuclease is one engineered for increased fidelity.

[0352] In some embodiments, the disclosure provides a system for use with a NGG PAM comprising a gRNA molecule, wherein the gRNA molecule comprises a spacer sequence corresponding to a target sequence, wherein the target sequence is within exon 1 or exon 2 of FAAH. In some embodiments, wherein the gRNA is introduced into a cell with a site-directed endonuclease that recognizes an NGG PAM (e.g., SpCas9 or functional derivative thereof), the gRNA and the site-directed endonuclease combine to introduce a DNA DSB proximal the target sequence (e.g., within exon 1 or exon 2 of FAAH). In some embodiments, repair of the DNA DSB (e.g., by an NEHJ repair pathway) introduces a mutation proximal the target sequence. In some embodiments, the mutation is an INDEL of at least ±1 nt (e.g., ±1, ±2, ±3, ±4, ±5, etc). In some embodiments, the INDEL disrupts the FAAH ORF, for example, by introducing a frameshift mutation in the FAAH coding sequence (e.g., within exon 1 or exon 2 of FAAH), wherein the disruption results in a FAAH transcript having an altered reading frame and/or a FAAH transcript encoding a mutated FAAH polypeptide with reduced or eliminated enzymatic activity. In some embodiments, the INDEL is a point mutation. In some embodiments, the INDEL introduces a premature stop codon in the FAAH coding sequence.

[0353] In some embodiments, the gRNA for use with a site-directed endonuclease that recognizes a NGG PAM comprises a spacer sequence corresponding to a target sequence consisting of a nucleotide sequence as set forth by any one of SEQ ID NOs: 7-14, 16-21, 24-34. In some embodiments the gRNA comprises a spacer sequence comprising up to 1, 2, or 3 nucleotide deletions or substitutions relative to any one of SEQ ID NOs: 41-48, 50-55, 58-68.

[0354] In some embodiments, the target sequence is proximal exon 1 or exon 2 of FAAH. In some embodiments, the 3′ terminus of the target sequence is about 100 nt, about 90 nt, about 80 nt, about 70 nt, about 60 nt, about 50 nt, about 40 nt, about 30 nt, about 20 nt, or about 10 nt upstream the 5′ terminus of exon 1 or exon 2 of FAAH. In some embodiments, the 5′ terminus of the target sequence is about 10 nt, about 20 nt, about 30 nt, about 40 nt, about 50 nt, about 60 nt, about 70 nt, about 80 nt, about 90 nt, or about 100 nt downstream the 3′ terminus of exon 1 or exon 2 of FAAH. In some embodiments, wherein the gRNA is introduced into a cell with a site-directed endonuclease that recognizes an NGG PAM (e.g., SpCas9), the gRNA and the site-directed endonuclease combine to introduce a DNA DSB proximal the target sequence (e.g., upstream the 5′ terminus of exon 1 or exon 2 of FAAH, e.g., downstream the 3′ terminus of exon 1 or exon 2 of FAAH). In some embodiments, the mutation is an INDEL of at least ±1 nt (e.g., ±1, ±2, ±3, ±4, ±5, etc). In some embodiments, the INDEL disrupts a regulatory sequence of FAAH, wherein the disrupts results in decreased expression of FAAH (e.g., decreased transcription of FAAH, decreased or inhibited splicing of FAAH pre-mRNA, decreased translation of FAAH transcript). In some embodiments, the INDEL disrupts a splicing element of FAAH.

[0355] In some embodiments, the gRNA for use with a site-directed endonuclease that recognizes a NGG PAM comprises a spacer sequence corresponding to a target sequence consisting of a nucleotide sequence as set forth by any one of SEQ ID NOs: 3-6, 22, and 23. In some embodiments the gRNA comprises a spacer sequence comprising up to 1, 2, or 3 nucleotide deletions or substitutions relative to any one of SEQ ID NOs: 37-40, 56, and 57.

[0356] In some embodiments, the gRNA for use with a site-directed endonuclease that recognizes a NGG PAM (e.g., SpCas9 or functional derivative thereof), when introduced into a population of cells with the site-directed endonuclease, combines with the site-directed endonuclease to introduce a DNA DSB proximal the gRNA target sequence within or proximal the FAAH coding sequence (e.g., exon 1 or exon 2 of FAAH), wherein the cleavage efficiency (e.g., as measured by TIDE analysis) is at least about 15%, about 20%, about 25%, about 30%, about 35%, about 40%, about 45%, about 50%, about 55%, about 60%, about 65%, about 70%, about 75%, about 80%, about 85%, about 90%, about 95%, or higher. In some embodiments, repair of the DNA DSB introduces a mutation (e.g., an INDEL) resulting in decreased expression of FAAH mRNA (e.g., as measured by qPCR or ddPCR) by at least 15%, at least 20%, at least 25%, at least 30%, at least 35%, at least 40%, at least 45%, at least 50%, at least 55%, at least 60%, at least 65%, at least 70%, at least 75% or more compared to an unmodified population of cells. In some embodiments, repair of the DNA DSB introduces a mutation (e.g., an INDEL) resulting in decreased expression of FAAH polypeptide (e.g., as measured by western blot) by at least 15%, at least 20%, at least 25%, at least 30%, at least 35%, at least 40%, or more compared to an unmodified population of cells.

[0357] In some embodiments, the disclosure provides a system for use with a NNGRRT PAM for introducing a mutation in a genomic DNA molecule comprising FAAH, wherein the system comprises one or more gRNAs and a site-directed endonuclease that recognizes an NNGRRT PAM. In some embodiments, the site-directed endonuclease is a SaCas9 endonuclease or a functional derivative thereof, an mRNA encoding the SaCas9 endonuclease or functional derivative thereof, or a recombinant expression vector comprising a nucleotide sequence encoding the SaCas9 endonuclease or functional derivative thereof. For example, in some embodiments, a functional derivative of SaCas9 endonuclease is one engineered for increased fidelity.

[0358] In some embodiments, the disclosure provides a system for use with a NNGRRT PAM comprising a gRNA molecule, wherein the gRNA molecule comprises a spacer sequence corresponding to a target sequence, wherein the target sequence is within exon 1, exon 2, or exon 4 of FAAH. In some embodiments, wherein the gRNA is introduced into a cell with a site-directed endonuclease that recognizes an NNGRRT PAM (e.g., SaCas9 or functional derivative thereof), the gRNA and the site-directed endonuclease combine to introduce a DNA DSB proximal the target sequence (e.g., within exon 1, exon 2, or exon 4 of FAAH). In some embodiments, repair of the DNA DSB (e.g., by an NEHJ repair pathway) introduces a mutation proximal the target sequence. In some embodiments, the mutation is an INDEL of at least ±1 nt (e.g., ±1, ±2, ±3, ±4, ±5, etc). In some embodiments, the INDEL disrupts the FAAH ORF, for example, by introducing a frameshift mutation in the FAAH coding sequence (e.g., within exon 1, exon 2, or exon 4 of FAAH), wherein the disruption results in a FAAH transcript having an altered reading frame and/or a FAAH transcript encoding a mutated FAAH polypeptide with reduced or eliminated enzymatic activity. In some embodiments, the INDEL is a point mutation. In some embodiments, the INDEL introduces a premature stop codon in the FAAH coding sequence.

[0359] In some embodiments, the gRNA for use with a site-directed endonuclease that recognizes a NNGRRT PAM comprises a spacer sequence corresponding to a target sequence consisting of a nucleotide sequence as set forth by SEQ ID NOs: 152, 155, 156, 158, 159, 160, 161, 162, and 163. In some embodiments the gRNA comprises a spacer sequence comprising up to 1, 2, or 3 nucleotide deletions or substitutions relative to any one of SEQ ID NOs: 168, 171, 172, 174, 175, 176, 177, 178, and 179.

[0360] In some embodiments, the target sequence is proximal exon 1, exon 2, or exon 4 of FAAH. In some embodiments, the 3′ terminus of the target sequence is about 100 nt, about 90 nt, about 80 nt, about 70 nt, about 60 nt, about 50 nt, about 40 nt, about 30 nt, about 20 nt, or about 10 nt upstream the 5′ terminus of exon 1, exon 2, or exon 4 of FAAH. In some embodiments, the 5′ terminus of the target sequence is about 10 nt, about 20 nt, about 30 nt, about 40 nt, about 50 nt, about 60 nt, about 70 nt, about 80 nt, about 90 nt, or about 100 nt downstream the 3′ terminus of exon 1, exon 2, or exon 4 of FAAH. In some embodiments, wherein the gRNA is introduced into a cell with a site-directed endonuclease that recognizes an NNGRRT PAM (e.g., SaCas9 or functional derivative thereof), the gRNA and the site-directed endonuclease combine to introduce a DNA DSB proximal the target sequence (e.g., upstream the 5′ terminus of exon 1, exon 2, or exon 4 of FAAH, e.g., downstream the 3′ terminus of exon 1, exon 2, or exon 4 of FAAH). In some embodiments, the mutation is an INDEL of at least ±1 nt (e.g., ±1, ±2, ±3, ±4, ±5, etc). In some embodiments, the INDEL disrupts a regulatory sequence of FAAH, wherein the disrupts results in decreased expression of FAAH (e.g., decreased transcription of FAAH, decreased or inhibited splicing of FAAH pre-mRNA, decreased translation of FAAH transcript). In some embodiments, the INDEL disrupts a splicing element of FAAH.

[0361] In some embodiments, the gRNA for use with a site-directed endonuclease that recognizes a NNGRRT PAM comprises a spacer sequence corresponding to a target sequence consisting of a nucleotide sequence as set forth by any one of SEQ ID NOs: 149, 150, 151, 153, 164. In some embodiments the gRNA comprises a spacer sequence comprising up to 1, 2, or 3 nucleotide deletions or substitutions relative to any one of SEQ ID NOs: 165, 166, 167, 169, 180.

[0362] In some embodiments, the gRNA for use with a site-directed endonuclease that recognizes a NNGRRT PAM (e.g., SaCas9 or functional derivative thereof), when introduced into a population of cells with the site-directed endonuclease, combines with the site-directed endonuclease to introduce a DNA DSB proximal the gRNA target sequence within or proximal the FAAH coding sequence (e.g., exon 1 or exon 2 of FAAH), wherein the cleavage efficiency (e.g., as measured by TIDE analysis) is at least about 20%, about 25%, about 30%, about 35%, about 40%, about 45%, about 50%, about 55%, about 60%, about 65%, about 70%, about 75%, about 80%, about 85%, or higher. In some embodiments, repair of the DNA DSB introduces a mutation (e.g., an INDEL) resulting in decreased expression of FAAH mRNA (e.g., as measured by qPCR or ddPCR) by at least 15%, at least 20%, at least 25%, at least 30%, at least 35%, at least 40%, at least 45%, at least 50%, at least 55%, at least 60%, at least 65%, at least 70%, at least 75%, at least 80%, at least 85%, at least 90% or more compared to an unmodified population of cells. In some embodiments, repair of the DNA DSB introduces a mutation (e.g., an INDEL) resulting in decreased expression of FAAH polypeptide (e.g., as measured by western blot) by at least 15%, at least 20%, at least 25%, at least 30%, at least 35%, at least 40%, or more compared to an unmodified population of cells.

### V. Modified Nucleases

[0363] In certain embodiments, the disclosure provides gene-editing systems comprising a site-directed endonuclease, wherein the nuclease is optionally modified from its wild-type counterpart. In some embodiments, the nuclease is fused with at least one heterologous protein domain. At least one protein domain is located at the N-terminus, the C-terminus, or in an internal location of the nuclease. In some embodiments, two or more heterologous protein domains are at one or more locations on the nuclease.

[0364] In some embodiments, the protein domain may facilitate transport of the nuclease into the nucleus of a cell. For example, the protein domain is a nuclear localization signal (NLS). In some embodiments, the nuclease is fused with 1-10 NLS(s). In some embodiments, the nuclease is fused with 1-5 NLS(s). In some embodiments, the nuclease is fused with one NLS. In other embodiments, the nuclease is fused with more than one NLS. In some embodiments, the nuclease is fused with 2, 3, 4, or 5 NLSs. In some embodiments, the nuclease is fused with 2 NLSs. In some embodiments, the nuclease is fused with 3 NLSs. In some embodiments, the nuclease is fused with no NLS. In some embodiments, the NLS may be a monopartite sequence, such as, e.g., the SV40 NLS, PKKKRKV (SEQ ID NO: 1288) or PKKKRRV (SEQ ID NO: 1289). In some embodiments, the NLS is a bipartite sequence, such as, e.g., the NLS of nucleoplasmin, KRPAATKKAGQAKKKK (SEQ ID NO: 1290). In some embodiments, the NLS is genetically modified from its wild-type counterpart.

[0365] In additional embodiments, the protein domain may target the nuclease to a specific organelle, cell type, tissue, or organ.

[0366] In further embodiments, the protein domain is an effector domain. When the nuclease is directed to its target nucleic acid, e.g., when a Cas9 protein is directed to a target nucleic acid by a guide RNA, the effector domain may modify or affect the target nucleic acid. In some embodiments, the effector domain is chosen from a nucleic acid binding domain, a nuclease domain, an epigenetic modification domain, a transcriptional activation domain, or a transcriptional repressor domain. In some embodiments, the effector domain can be a nucleobase deaminase domain.

### VI. Target Sites

[0367] In some embodiments, the site-directed nucleases described herein are directed to and cleave (e.g., introduce a DSB) a target nucleic acid molecule (e.g., a target site within or proximal the FAAH coding sequence; e.g., a target site within or proximal FAAH-OUT). In some embodiments, a Cas nuclease is directed by a guide RNA to a target site of a target nucleic acid molecule (e.g., genomic DNA molecule), where the guide RNA hybridizes with the complementary strand of the target sequence and the Cas nuclease cleaves the target nucleic acid at the target site. In some embodiments, the complementary strand of the target sequence is complementary to the targeting sequence (e.g.: spacer sequence) of the guide RNA. In some embodiments, the degree of complementarity between a targeting sequence of a guide RNA and its corresponding complementary strand of the target sequence is about 50%, 55%, 60%, 65%, 70%, 75%, 80%, 85%, 90%, 95%, 97%, 98%, 99%, or 100%. In some embodiments, the complementary strand of the target sequence and the targeting sequence of the guide RNA is 100% complementary. In other embodiments, the complementary strand of the target sequence and the targeting sequence of the guide RNA contains at least one mismatch. For example, the complementary strand of the target sequence and the targeting sequence of the guide RNA contain 1, 2, 3, 4, 5, 6, 7, 8, 9, or 10 mismatches. In some embodiments, the complementary strand of the target sequence and the targeting sequence of the guide RNA contains 1-6 mismatches. In some embodiments, the complementary strand of the target sequence and the targeting sequence of the guide RNA contain 1, 2, or 3 mismatches.

[0368] The length of the target sequence may depend on the nuclease system used. For example, the target sequence for a CRISPR/Cas system comprise 5, 6, 7, 8, 9, 10, 11, 12, 13, 14, 15, 16, 17, 18, 19, 20, 21, 22, 23, 24, 25, 26, 27, 28, 29, 30, 35, 40, 45, 50, or more than 50 nucleotides in length. In some embodiments, the target sequence comprises 18-24 nucleotides in length. In some embodiments, the target sequence comprises 19-22 nucleotides in length. In some embodiments, the target sequence comprises 20 nucleotides in length. In some embodiments, the target sequence comprises 21 nucleotides in length. In some embodiments, the target sequence comprises 22 nucleotides in length.

### Nucleic Acids Encoding System Components

[0369] The present disclosure provides a nucleic acid comprising a nucleotide sequence encoding a gRNA molecule of the disclosure, a site-directed endonuclease of the disclosure, and/or any nucleic acid or proteinaceous molecule necessary to carry out the aspects of the methods of the disclosure. In some embodiments, the nucleic acid comprises a vector (e.g., a recombinant expression vector).

### I. Vectors

[0370] In some embodiments, the site-directed nuclease (e.g., Cas nuclease) and the one or more gRNAs of the disclosure are provided by one or more vectors. As used herein, the term “vector” refers to a nucleic acid molecule capable of transporting another nucleic acid to which it has been linked. In some embodiments, the vector is a DNA vector. In some embodiments, the vector is circular. In some embodiments, the vector is linear. Non-limiting exemplary vectors include plasmids, phagemids, cosmids, artificial chromosomes, minichromosomes, transposons, viral vectors, and expression vectors.

[0371] In some embodiments, the vector is an expression vector, wherein the expression vector is capable of directing the expression of nucleic acids to which it is operably linked. As used herein, an “expression vector” or “recombinant expression vector” refers to a replicon, such as plasmid, phage, virus, or cosmid, to which another DNA segment, i.e. an “insert”, is attached so as to bring about the replication of the attached segment in a cell.

[0372] In some embodiments, the vector or expression vector is a plasmid. As used herein, a “plasmid” refers to a circular double-stranded DNA loop into which additional nucleic acid segments are ligated.

[0373] In some embodiments, the vector or expression vector is a viral vector, wherein additional nucleic acid segments are ligated into the viral genome. Non-limiting exemplary viral vectors include viral vectors based on vaccinia virus; poliovirus; adenovirus; adeno-associated virus; SV40; herpes simplex virus; human immunodeficiency virus; picornaviruses. Non-limiting exemplary viral vectors also include viral vectors based on a retrovirus such as a Murine Leukemia Virus, spleen necrosis virus, and vectors derived from retroviruses such as Rous Sarcoma Virus, Harvey Sarcoma Virus, avian leukosis virus, a lentivirus, human immunodeficiency virus, myeloproliferative sarcoma virus, and mammary tumor virus. In some embodiments, the vectors is for use in eukaryotic target cells and includes, but is not limited to, pXT1, pSG5, pSVK3, pBPV, pMSG, and pSVLSV40 (Pharmacia).

[0374] In some embodiments, the vector comprises one or more transcription and/or translation control elements. In some embodiments, the more transcription and/or translation control elements used depends on the target cell population and the vector system. In some embodiments, any number of suitable transcription and translation control elements, including constitutive and inducible promoters, transcription enhancer elements, transcription terminators, etc. are used in the expression vector, such as those further described below.

[0375] In some embodiments, a vector comprising a nucleic acid encoding a gRNA molecule of the disclosure and/or a site-directed endonuclease of the disclosure is operably linked to a control element, e.g., a transcriptional control element, such as a promoter. In some embodiments, the transcriptional control element is functional in a eukaryotic cell, e.g., a mammalian cell, e.g., a human cell. In some embodiments, the nucleotide sequence encoding the gRNA molecule and/or the site-directed endonuclease is operably linked to one or more control elements that enable expression of the nucleotide sequence encoding the gRNA and/or a site-directed endonuclease in eukaryotic cells, e g, mammalian cells, e.g., human cells.

[0376] In some embodiments, the promoter is a constitutively active promoter (i.e., a promoter that is constitutively in an active/“ON” state). In some embodiments, the promoter is an inducible promoter (i.e., a promoter whose state, active/“ON” or inactive/“OFF”, is controlled by an external stimulus, e.g., the presence of a particular temperature, compound, or protein). In some embodiments, the promoter is a spatially restricted promoter (i.e., transcriptional control element, enhancer, etc.) (e.g., tissue specific promoter, cell type specific promoter, etc.). In some embodiments, the promoter is temporally restricted promoter (i.e., the promoter is in the “ON” state or “OFF” state during specific stages of embryonic development or during specific stages of a biological process).

[0377] Suitable promoters for use in the present disclosure include those derived from viruses and are referred to herein as viral promoters, or they include those derived from an organism, including prokaryotic or eukaryotic organisms. In some embodiments, a suitable promoter for use in the present disclosure include any promoter that drives expression by an RNA polymerase (e.g., pol I, pol II, pol III).

[0378] Exemplary promoters include, but are not limited to, the SV40 early promoter, mouse mammary tumor virus long terminal repeat (LTR) promoter; adenovirus major late promoter (Ad MLP); a herpes simplex virus (HSV) promoter, a cytomegalovirus (CMV) promoter such as the CMV immediate early promoter region (CMVIE), a rous sarcoma virus (RSV) promoter, a human U6 small nuclear promoter (U6) (Miyagishi et al., Nature Biotechnology 20, 497-500 (2002)), an enhanced U6 promoter (e.g., Xia et al., Nucleic Acids Res. 2003 Sep. 1; 31(17)), a human H1 promoter (H1), and the like.

[0379] Exemplary eukaryotic promoters (i.e., promoters functional in a eukaryotic cell) include, but are not limited to, those from cytomegalovirus (CMV) immediate early, herpes simplex virus (HSV) thymidine kinase, early and late SV40, long terminal repeats (LTRs) from retrovirus, human elongation factor-1 promoter (EF1), a hybrid construct comprising the cytomegalovirus (CMV) enhancer fused to the chicken beta-actin promoter (CAG), murine stem cell virus promoter (MSCV), phosphoglycerate kinase-1 locus promoter (PGK), and mouse metallothionein-I.

[0380] In some embodiments, a gRNA molecule of the disclosure is encoded by vector comprising a RNA polymerase III promoter (e.g., U6 and H1). Descriptions of and parameters for enhancing the use of such promoters are known in art, and additional information and approaches are regularly being described; see, e.g., Ma, H. et al., Molecular Therapy—Nucleic Acids 3, e161 (2014) doi:10.1038/mtna.2014.12.

[0381] In some embodiments, the expression vector comprises a ribosome binding site for translation initiation and a transcription terminator. In some embodiments, the expression vector comprises appropriate sequences for amplifying expression. In some embodiments, the expression vector comprises nucleotide sequences encoding non-native tags (e.g., histidine tag, hemagglutinin tag, green fluorescent protein, etc.), for example, that are operably-linked to a site-directed endonuclease, thereby providing a fusion protein of the site-directed endonuclease.

[0382] In some embodiments, the expression vector comprises a promoter that is an inducible promoter (e.g., a heat shock promoter, tetracycline-regulated promoter, steroid-regulated promoter, metal-regulated promoter, estrogen receptor-regulated promoter, etc.). In some embodiments, the promoter is a constitutive promoter (e.g., CMV promoter, UBC promoter). In some embodiments, the promoter is a spatially restricted and/or temporally restricted promoter (e.g., a tissue specific promoter, a cell type specific promoter, etc.).

[0383] Examples of inducible promoters include, but are not limited to, T7 RNA polymerase promoter, T3 RNA polymerase promoter, Isopropyl-beta-D-thiogalactopyranoside (IPTG)-regulated promoter, lactose induced promoter, heat shock promoter, Tetracycline-regulated promoter (e.g., Tet-ON, Tet-OFF, etc.), steroid-regulated promoter, metal-regulated promoter, estrogen receptor-regulated promoter, etc. In some embodiments, an inducible promoters is regulated by molecules including, but not limited to, doxycycline; RNA polymerase, e.g., T7 RNA polymerase; an estrogen receptor; an estrogen receptor fusion; etc.

[0384] Spatially restricted promoters can also be referred to as enhancers, transcriptional control elements, control sequences, etc. Any convenient spatially restricted promoter is suitable for use in the present disclosure, and the choice of a suitable promoter (e.g., a liver-specific promoter, a brain specific promoter, a promoter that drives expression in a subset of neurons, a promoter that drives expression in the germline, a promoter that drives expression in the lungs, a promoter that drives expression in muscles, a promoter that drives expression in islet cells of the pancreas, etc.) will depend on the organism. For example, various spatially restricted promoters are known for plants, flies, worms, mammals, mice, etc. Thus, a spatially restricted promoter can be used to regulate the expression of a nucleic acid encoding a site-directed endonuclease and/or one or more gRNA molecules in a wide variety of different tissues and cell types, depending on the organism. Some spatially restricted promoters are also temporally restricted such that the promoter is in the “ON” state or “OFF” state during specific stages of embryonic development or during specific stages of a biological process.

[0385] For illustration purposes, examples of spatially restricted promoters include, but are not limited to, liver-specific promoters, neuron-specific promoters, adipocyte-specific promoters, cardiomyocyte-specific promoters, smooth muscle-specific promoters, photoreceptor-specific promoters, etc.

[0386] Neuron-specific spatially restricted promoters include, but are not limited to, a neuron-specific enolase (NSE) promoter (see, e.g., EMBL HSENO2, X51956); an aromatic amino acid decarboxylase (AADC) promoter; a neurofilament promoter (see, e.g., GenBank HUMNFL, L04147); a synapsin promoter (see, e.g., GenBank HUMSYNIB, M55301); a thy-1 promoter (see, e.g., Chen et al. (1987) Cell 51:7-19; and Llewellyn, et al. (2010) Nat. Med. 16(10):1161-1166); a serotonin receptor promoter (see, e.g., GenBank S62283); a tyrosine hydroxylase promoter (TH) (see, e.g., Oh et al. (2009) Gene Ther 16:437; Sasaoka et al. (1992) Mol. Brain Res. 16:274; Boundy et al. (1998) J. Neurosci. 18:9989; and Kaneda et al. (1991) Neuron 6:583-594); a GnRH promoter (see, e.g., Radovick et al. (1991) Proc. Natl. Acad. Sci. USA 88:3402-3406); an L7 promoter (see, e.g., Oberdick et al. (1990) Science 248:223-226); a DNMT promoter (see, e.g., Bartge et al. (1988) Proc. Natl. Acad. Sci. USA 85:3648-3652); an enkephalin promoter (see, e.g., Comb et al. (1988) EMBO J. 17:3793-3805); a myelin basic protein (MBP) promoter; a Ca²⁺-calmodulin-dependent protein kinase II-alpha (CamKIIa) promoter (see, e.g., Mayford et al. (1996) Proc. Natl. Acad. Sci. USA 93:13250; and Casanova et al. (2001) Genesis 31:37); a CMV enhancer/platelet-derived growth factor-0 promoter (see, e.g., Liu et al. (2004) Gene Therapy 11:52-60); and the like.

[0387] Methods of introducing a nucleic acid to a host cell or a population of host cells are known in the art, and any known method can be used to introduce a nucleic acid (e.g., an expression construct) into a cell. In some embodiments, a nucleic acid molecule encoding a guide RNA (introduced either as DNA or RNA) and/or a site-directed endonuclease (introduced as DNA or RNA) are provided to a population of cells using well-developed transfection techniques; see, e.g. Angel and Yanik (2010) PLoS ONE 5(7): e 11756, and the commercially available TransMessenger® reagents from Qiagen, Stemfect™ RNA Transfection Kit from Stemgent, and TransIT®-mRNA Transfection Kit from Mims Bio LLC (See, also Beumer et al. (2008). PNAS 105(50):19821-19826). In some embodiments, the nucleic acids encoding a guide RNA and/or a site-directed endonuclease are provided as a DNA vectors, e.g. plasmids, cosmids, minicircles, phage, viruses, etc. In some embodiments, the vectors comprising the nucleic acid(s) are maintained episomally, e.g. as plasmids, minicircle DNAs, viruses such cytomegalovirus, adenovirus, etc. In some embodiments, the vectors integrated into the host cell genome, through homologous recombination or random integration, e.g. retrovirus-derived vectors such as MMLV, HIV-1, ALV, etc.

### II. Messenger RNA Encoding Cas Nuclease

[0388] In some aspects, the disclosure provides an mRNA encoding a site-directed endonuclease (e.g., SluCas9, SpCas9, SaCas9), for use in methods of genome editing using a CRISPR/Cas system. In some embodiments, the mRNA comprises a 5′ UTR, an open reading frame (ORF) comprising a nucleotide sequence encoding the site-directed endonuclease, and a 3′ UTR.

[0389] In some embodiments, the mRNA comprises one or more modification to improve mRNA stability, increase mRNA translation efficiency, and/or reduce mRNA immunogenicity. In some embodiments, the one or more modification is sequence optimization of the mRNA and/or chemical modification of at least one nucleotide of the mRNA.

[0390] In some embodiments, the mRNA comprises a sequence-optimized nucleotide sequence. In some embodiments, the mRNA comprises a nucleotide sequence that is sequence optimized for expression in a target cell. In some embodiments, the target cell is a mammalian cell. In some embodiments, the target cell is a human cell, a murine cell, or a non-human primate (NHP) cell. Methods of sequence optimization are known in the art, and include known sequence optimization tools, algorithms and services. Non-limiting examples include services from GeneArt (Life Technologies), DNA2.0 (Menlo Park Calif.), Geneious®, GeneGPS® (Atum, Newark, Calif.), and/or proprietary methods. In some embodiments, the nucleotide sequence is (i) sequence-optimized based on codon usage bias in a host cell (e.g., mammalian cell, e.g., human cell, murine cell, non-human primate cell) relative to a reference sequence, (ii) uridine-depleted relative to a reference sequence, or (iii) a combination of (i) and (ii), using a method of sequence optimization (e.g., GeneGPS®, e.g., Geneious®).

[0391] In some embodiments, the mRNA has chemistries suitable for delivery, tolerability, and stability within cells, e.g., following in vivo or in vitro administration. In some embodiments, the mRNA is modified, e.g., comprises a modified sugar moiety, a modified internucleoside linkage, a modified nucleoside, a modified nucleotide and/or combinations thereof. In some embodiments, the modified mRNA exhibits one or more of the following properties: is not immune stimulatory; is nuclease resistant; has improved cell uptake; has increased half-life; has increased translation efficiency; and/or is not toxic to cells or mammals, e.g., following contact with cells in vivo or ex vivo or in vitro.

### A. Messenger RNA Components

[0392] In some embodiments, the disclosure provides an mRNA comprising an open-reading frame (ORF), wherein the ORF comprises a nucleotide sequence that encodes a site-directed endonuclease, such as a Cas nuclease.

[0393] In some embodiments, an mRNA of the disclosure comprises a 5′ untranslated region (5′ UTR), a 3′ untranslated region (3′ UTR), and an ORF comprising a nucleotide sequence encoding a site-directed endonuclease (e.g., Cas nuclease). In some embodiments, the mRNA further comprises a 5′ cap structure, a Kozak or Kozak-like sequence (also known as a Kozak consensus sequence), a polyA sequence (also known as a polyadenylation signal), a nucleotide sequence encoding a nuclear localization signal (NLS), a nucleotide sequence encoding a linker peptide, a nucleotide sequence encoding a tag peptide, or any combination thereof. In some embodiments, the consensus Kozak consensus sequence facilitates the initial binding of mRNA to ribosomes, thereby enhances its translation into a polypeptide product.

[0394] In some embodiments, an mRNA of the disclosure comprises any suitable number of base pairs, e.g., thousands (e.g., 4000, 5000, 6000, 7000, 8000, 9000, or 10,000) of base pairs. In some embodiments, the mRNA is about 4.2 kb, about 4.3 kb, about 4.4 kb, about 4.5 kb, about 4.6 kb, about 4.7 kb, about 4.8 kb, about 4.9 kb, about 5.0 kb, about 5.1 kb, about 5.2 kb, about 5.3 kb, about 5.4 kb, about 5.5 kb, or more in length.

[0395] In some embodiments, the 5′ UTR or 3′ UTR is derived from a human gene sequence. Non-limiting exemplary 5′ UTR and 3′ UTR include those derived from genes encoding α- and β-globin, albumin, HSD17B4, and eukaryotic elongation factor 1a. In addition, viral-derived 5′ UTR and 3′ UTRs can also be used and include orthopoxvirus and cytomegalovirus UTR sequences.

[0396] In some embodiments, an mRNA of the disclosure comprises a 5′ cap structure. A 5′ cap structure or cap species is a compound including two nucleoside moieties joined by a linker and may be selected from a naturally occurring cap, a non-naturally occurring cap or cap analog, or an anti-reverse cap analog (ARCA). A cap species may include one or more modified nucleosides and/or linker moieties. For example, a natural mRNA cap may include a guanine nucleotide and a guanine (G) nucleotide methylated at the 7 position joined by a triphosphate linkage at their 5′ positions, e.g., m⁷G(5′)ppp(5′)G, commonly written as m⁷GpppG. This cap is a cap-0 where nucleotide N does not contain 2′OMe, or cap-1 where nucleotide N contains 2′OMe, or cap-2 where nucleotides N and N+1 contain 2′OMe. This cap may also be of the structure m2 7′3 “G(5′)N as incorporated by the anti-reverse-cap analog (ARCA), and may also include similar cap-0, cap-1, and cap-2, etc., structures.

[0397] In some embodiments, an mRNA of the disclosure further comprises a nucleotide sequence encoding a nuclear localization signal (NLS). In some embodiments, the nuclease is fused with more than one NLS. In some embodiments, one or more NLS is operably-linked to the N-terminus, C-terminus, or both, of the site-directed endonuclease, optionally via a peptide linker. In some embodiments, the NLS comprises a nucleoplasmin NLS and/or a SV40 NLS. some embodiments, the mRNA comprises a nucleotide sequence encoding a nucleoplasmin NLS and a nucleotide sequence encoding an SV40 NLS.

[0398] In some embodiments, an mRNA of the disclosure comprises a poly(A) tail (i.e., polyA sequence, i.e., polyadenylation signal). In some embodiments, the polyA sequence comprises entirely or mostly of adenine nucleotides or analogs or derivatives thereof. In some embodiments, the polyA sequence is a tail located adjacent (e.g., towards the 3′ end) of a 3′ UTR of an mRNA. In some embodiments, the polyA sequence promotes or increases the nuclear export, translation, and/or stability of the mRNA.

[0399] In some embodiments, the poly(A) tail comprises a 3′ “cap” comprising modified or non-natural nucleobases or other synthetic moieties.

### III. Nucleic Acid Modifications

[0400] In some embodiments, a nucleic acid of the disclosure (e.g., gRNA and/or mRNA encoding a site-directed endonuclease) of the disclosure comprises one or more modified nucleobases, nucleosides, nucleotides or internucleoside linkages. In some embodiments, modified nucleic acids disclosure (e.g., gRNA and/or mRNA encoding a site-directed endonuclease) have useful properties, including enhanced stability, intracellular retention, enhanced translation, and/or the lack of a substantial induction of the innate immune response of a cell into which the nucleic acid is introduced, as compared to a reference unmodified nucleic acid. Therefore, use of modified nucleic acids may enhance the efficiency of protein production (e.g., expression of a site-directed endonuclease), intracellular retention of the nucleic acids, efficiency of a genome editing system comprising the nucleic acid, as well as possess reduced immunogenicity.

[0401] In some embodiments, a gRNA and/or mRNA of the disclosure comprises one or more (e.g., 1, 2, 3, 4, 5, 6, 7, 8, 9, 10, 20, 30, 40, 50, 60, 70, 80, 90, 100, or more) different modified nucleobases, nucleosides, nucleotides or internucleoside linkages. In some embodiments, the modified nucleic acid (e.g., gRNA, and/or mRNA) has reduced degradation in a cell into which the nucleic acid is introduced, relative to a corresponding unmodified nucleic acid.

[0402] In some embodiments, the modified nucleobase is a modified uracil, such as any modified uracil known in the art. In some embodiments, the modified nucleobase is a modified cytosine, such as any modified cytosine known in the art. In some embodiments, the modified nucleobase is modified adenine, such as any modified adenine known in the art. In some embodiments, the modified nucleobase is modified guanine, such as any modified guanine known in the art.

[0403] In some embodiments, a nucleic acid (e.g., mRNA and/or gRNA) of the disclosure includes a combination of one or more of the aforementioned modified nucleobases (e.g., a combination of 2, 3 or 4 of the aforementioned modified nucleobases).

[0404] In certain embodiments, a nucleic acid (e.g., mRNA and/or gRNA) of the disclosure is uniformly modified (i.e., fully modified, modified through-out the entire sequence) for a particular modification. For example, an mRNA can be uniformly modified with N1-methylpseudouridine (m¹ψ) or 5-methyl-cytidine (m⁵C), meaning that all uridines or all cytosine nucleosides in the mRNA sequence are replaced with N1-methylpseudouridine (m¹Ψ) or 5-methyl-cytidine (m⁵C). Similarly, a nucleic acid (e.g., mRNA and/or gRNA) of the disclosure can be uniformly modified for any type of nucleoside residue present in the sequence by replacement with a modified residue such as those set forth above.

### Delivery

[0405] In some embodiments, delivery of gene editing systems components described herein (e.g., gRNA and/or site-directed endonuclease) is performed by one or more methods described herein. In some embodiments, the system components, for example, one or more gRNA molecules and/or a site-directed endonuclease (e.g., Cas nuclease), are delivered by viral vectors, lipid nanoparticles (LNPs), synthetic polymers, or a combination thereof. In some embodiments, the methods of delivery described herein are suitable for administering a gene editing system of the disclosure to a target cell population or target tissue for the purpose of cellular, ex vivo, or in vivo gene editing.

[0406] In some embodiments, the delivery comprises administering the site-directed endonuclease as nucleic acid encoding the site-directed endonuclease (RNA or DNA). In some embodiments, the site-directed endonuclease is delivered as an mRNA or a recombinant expression vector comprising a nucleic acid encoding the site-directed endonuclease (e.g, plasmid, viral vector). In some embodiments, the delivery comprises administering the site-directed endonuclease as a polypeptide. In some embodiments, the delivery comprises administering one or more gRNAs or a nucleic acid encoding the one or more gRNAs. In some embodiments, the delivery comprises administering a recombinant expression vector comprising a nucleic acid encoding the one or more gRNAs (e.g., plasmid, viral vector).

[0407] In some embodiments, the delivery comprises administering the site-directed endonuclease as a mRNA. In some embodiments, the delivery comprises administering the mRNA, wherein the mRNA is formulated by LNP or another delivery vehicle, such as a polymeric nanoparticles. In some embodiments, the delivery comprises administering the mRNA separately formulated or co-formulated with one or more gRNAs. In some embodiments, the mRNA and the one or more gRNAs are separately formulated as an LNP or polymeric nanoparticle. In some embodiments, the mRNA and the one or more gRNAs are co-formulated as an LNP or polymeric nanoparticle.

[0408] In some embodiments, the delivery comprises administering a recombinant expression vector encoding the site-directed endonuclease. In some embodiments, the delivery comprises administering a recombinant expression vector encoding one or more gRNAs. In some embodiments, the delivery comprises administering a recombinant expression vector encoding the site-directed endonuclease and encoding one or more gRNAs, for example, on the same recombinant expression vector. In some embodiments, the delivery comprises administering the nucleic acid encoding the site-directed endonuclease and the nucleic acid encoding one or more gRNAs on different recombinant expression vectors, for example, up to 2, 3, or 4 recombinant expression vectors. In some embodiments, the recombinant expression vector is a non-viral vector (e.g., a plasmid). In some embodiments, the recombinant expression vector is a viral vector (e.g., an AAV). In some embodiments, the delivery comprises formulation of the one or more recombinant expression vectors using LNPs or polymeric nanoparticles.

[0409] In some embodiments, the delivery comprises administering the site-directed endonuclease as an mRNA, and administering the one or more gRNAs using a recombinant expression vector. In some embodiments, the delivery comprises administering the mRNA encoding the site-directed endonuclease formulated as an LNP or polymeric nanoparticle. In some embodiments, the delivery comprises administering the recombinant expression vector encoding the one or more gRNAs formulated as an LNP or polymeric nanoparticle. In some embodiments, the mRNA and the recombinant expression vector are separately formulated or co-formulated.

### I. Delivery of Complexes Comprising System Components

[0410] In some embodiments, the site-directed endonuclease is delivered as a polypeptide. In some embodiments, the site-directed endonuclease is delivered to a target cell population or target tissue ex vivo or in vivo as a polypeptide either alone or in combination with one or more gRNA molecules. In some embodiments, the site-directed endonuclease is delivered to target cell population or target tissue ex vivo or in vivo as a polypeptide that is pre-complexed with one or more guide RNAs. Such pre-complexed material is referred to herein as a “ribonucleoprotein particle” or “RNP”.

[0411] In some embodiments, the site-directed endonuclease is pre-complexed with one or more guide RNAs, or one or more sgRNAs. In some embodiments, the gene editing system comprises a ribonucleoprotein (RNP). In some embodiments, the gene editing system comprises a Cas9 RNP comprising a purified Cas9 protein (e.g., SpCas9, SluCas9, SaCas9) in complex with one or more gRNAs of the disclosure. The Cas9 protein can be expressed and purified by any means known in the art. In some embodiments, the ribonucleoprotein is assembled in vitro and delivered directly to cells using standard electroporation or transfection techniques known in the art. One benefit of the RNP is protection of the RNA from degradation.

[0412] In some embodiments, the site-directed endonuclease in the RNP is modified or unmodified. In some embodiments, the gRNA (e.g., crRNA, tracrRNA, or sgRNA) is modified or unmodified. Numerous modifications are known in the art and are suitable for use in the present disclosure.

[0413] In some embodiments, the site-directed endonuclease and the gRNA (e.g., sgRNA) are combined in an approximately 1:1 molar ratio. However, a wide range of molar ratios can be used to produce a RNP for use in the present disclosure.

[0414] In some embodiments, the RNP is delivered alone or using a delivery vehicle known in the art, for example, a lipid particle (e.g., LNP) or a synthetic nanoparticle (e.g., polymeric nanoparticle) or cell penetrating peptides (CPPs).

[0415] In some embodiments, ribonucleoprotein complexes comprising Cas9 protein (e.g., purified Cas9 protein) and one or more gRNA(s) are prepared for administration directly a target tissue. In some embodiments, RNP complexes comprising Cas9 protein (e.g., purified Cas9 protein), one or more gRNA(s), and one or more cell penetrating peptides are prepared for administration directly into a target tissue. Cell penetrating peptides for use in promoting RNP complex uptake by cells in a target tissue are known in the art. Non-limiting examples of CPPs for promoting cellular uptake of protein complexes include penetratin, R8, TAT, Transportan, Xentry, endo-porter, synthetic CPPs and cyclic derivatives thereof.

### II. Delivery of Nucleic Acids of the Disclosure

[0416] In some embodiments, the delivery comprises administering the site-directed endonuclease as a nucleic acid molecule (e.g., mRNA or recombinant expression vector). In some embodiments, delivery comprises administering one or more gRNAs or nucleic acid molecules encoding the one or more gRNAs (e.g., recombinant expression vector). In some embodiments, the nucleic acid molecules are delivered using a viral vector (e.g., AAV vector) or a non-viral delivery vehicle (e.g., LNP) known in the art. In some embodiments, a combination of a viral vector and a non-viral delivery vehicle are used.

[0417] In some embodiments, the nucleic acid molecules are delivered by non-viral delivery vehicles including, but not limited to, nanoparticles, liposomes, ribonucleoproteins, positively charged peptides, small molecule RNA-conjugates, aptamer-RNA chimeras, and RNA-fusion protein complexes. Non-limiting exemplary non-viral delivery vehicles include those described in Peer and Lieberman, Gene Therapy, 18: 1127-1133 (2011) (which focuses on non-viral delivery vehicles for siRNA that are also useful for delivery of other polynucleotides).

[0418] In some embodiments, the nucleic acid molecules are delivered by viral delivery vehicles, such as AAV. In some embodiments, the cloning capacity of the viral vector requires more than one vector to deliver the components of a gene editing system as disclosed herein. For example, in some embodiments, one viral vector (e.g., AAV vector) comprises a nucleotide sequence encoding a site-directed endonuclease (e.g., Cas nuclease), while a second viral vector (e.g., AAV vector) comprises one or more nucleotide sequences encoding one or more gRNAs described herein. In some embodiments, the cloning capacity of the viral vector is sufficient to deliver all components of a gene editing system disclosed herein. For example, in some embodiments, one vector (e.g., AAV vector) comprises nucleotide sequence encoding a site-directed endonuclease (e.g., Cas nuclease) and one or more nucleotide sequences encoding one or more gRNAs described herein.

[0419] In some embodiments, a recombinant adeno-associated virus (rAAV) vector is used for delivery. Techniques to produce rAAV particles, in which an AAV genome to be packaged that includes the polynucleotide to be delivered (e.g., nucleic acid encoding one or more gRNAs and/or a site-directed endonuclease), rep and cap genes, and helper virus functions are provided to a cell are standard in the art. Production of rAAV typically requires that the following components are present within a single cell (denoted herein as a packaging cell): a rAAV genome, AAV rep and cap genes separate from (i.e., not in) the rAAV genome, and helper virus functions. The AAV rep and cap genes can be from any AAV serotype for which recombinant virus can be derived, and can be from a different AAV serotype than the rAAV genome ITRs, including, but not limited to, AAV serotypes AAV-1, AAV-2, AAV-3, AAV-4, AAV-5, AAV-6, AAV-7, AAV-8, AAV-9, AAV-10, AAV-11, AAV-12, AAV-13 AAV rh.74 and tropism modified AAV vectors. Production of pseudotyped rAAV is disclosed in, for example, international patent application publication number WO 01/83692.

[0420] In some embodiments, a method of generating a packaging cell involves creating a cell line that stably expresses all of the necessary components for AAV particle production. For example, a plasmid (or multiple plasmids) comprising a rAAV genome lacking AAV rep and cap genes, AAV rep and cap genes separate from the rAAV genome, and a selectable marker, such as a neomycin resistance gene, are integrated into the genome of a cell. AAV genomes have been introduced into bacterial plasmids by procedures such as GC tailing (Samulski et al., 1982, Proc. Natl. Acad. S6. USA, 79:2077-2081), addition of synthetic linkers containing restriction endonuclease cleavage sites (Laughlin et al., 1983, Gene, 23:65-73) or by direct, blunt-end ligation (Senapathy & Carter, 1984, J. Biol. Chem., 259:4661-4666). The packaging cell line can then be infected with a helper virus, such as adenovirus. The advantages of this method are that the cells are selectable and are suitable for large-scale production of rAAV. Other examples of suitable methods employ adenovirus or baculovirus, rather than plasmids, to introduce rAAV genomes and/or rep and cap genes into packaging cells.

[0421] General principles of rAAV production are reviewed in, for example, Carter, 1992, Current Opinions in Biotechnology, 1533-539; and Muzyczka, 1992, Curr. Topics in Microbial. and Immunol., 158:97-129). Various approaches are described in Ratschin et al., Mol. Cell. Biol. 4:2072 (1984); Hermonat et al., Proc. Natl. Acad. Sci. USA, 81:6466 (1984); Tratschin et al., Mol. Cell. Biol. 5:3251 (1985); McLaughlin et al., J. Virol., 62:1963 (1988); and Lebkowski et al., 1988 Mol. Cell. Biol., 7:349 (1988). Samulski et al. (1989, J. Virol., 63:3822-3828); U.S. Pat. No. 5,173,414; WO 95/13365 and corresponding U.S. Pat. No. 5,658,776; WO 95/13392; WO 96/17947; PCT/US98/18600; WO 97/09441 (PCT/US96/14423); WO 97/08298 (PCT/US96/13872); WO 97/21825 (PCT/US96/20777); WO 97/06243 (PCT/FR96/01064); WO 99/11764; Perrin et al. (1995) Vaccine 13:1244-1250; Paul et al. (1993) Human Gene Therapy 4:609-615; Clark et al. (1996) Gene Therapy 3:1124-1132; U.S. Pat. Nos. 5,786,211; 5,871,982; and 6,258,595.

[0422] AAV vector serotypes can be matched to target cell types. For example, the following exemplary cell types can be transduced by the indicated AAV serotypes among others (see Table 1).

TABLE 1

| Tissue/Cell Type | Serotype |
|---|---|
| Liver | AAV3, AAV5, AAV8, AAV9 |
| Skeletal muscle | AAV1, AAV7, AAV6, AAV8, AAV9 |
| Central nervous | AAV5, AAV1, AAV4, AAV8, AAV9 |
| system | |
| RPE | AAV5, AAV4, AAV2, AAV8, AAV9, AAVrh8R |
| Photoreceptor cells | AAV5, AAV8, AAV9, AAVrh8R |
| Lung | AAV9, AAV5 |
| Heart | AAV9 |
| Pancreas | AAV8 |
| Kidney | AAV2, AAV8 |

[0423] In some embodiments, the AAV vector serotype is matched to enable targeting of sensory neurons, for example, sensory neurons residing in the DRG (e.g., lumbar DRG). AAV serotypes are known for preferential tropism to different neuron sizes present in the DRG. For example, AAV-6 has been shown effective for transducing neurons with diameter less than approximately 300 μm²), AAV-5 has been shown effective for transducing neurons with diameter of approximately 300 to 700 μm², and AAV-8 has been shown effective for transducing neurons with diameter greater than approximately 700 μm² (see, e.g., Yu H, et al. (2013). PLoS One. 8(4):e61266; Jacques S J, et al (2012). Mol Cell Neurosci. 49(4):464-74; Xu Q, et al (2012) PLoS One 7(3):e32581). Accordingly, in some embodiments, an AAV serotype for use in the present disclosure is one having preferential tropism for neurons with diameter less than approximately 300 μm² (e.g., AAV-6), one having preferential tropism for neurons with diameter approximately 300 to 700 μm² (e.g., AAV-5), and/or one having preferential tropism for neurons with diameter greater than approximately 700 μm² (e.g., AAV-8).

[0424] In some embodiments, an AAV vector serotype for use in the present disclosure is one able to penetrate the blood brain barrier (BBB). As a non-limiting example, AAV9 has been shown to cross the BBB following in vivo administration, see, e.g., Bey, et al (2020) Mol Therapy: Methods & Clinical Development 17:771. In some embodiments, an AAV vector serotype for use in the present disclosure is AAV9.

[0425] In addition to adeno-associated viral vectors, other viral vectors can be used. Such viral vectors include, but are not limited to, adenovirus, lentivirus, alphavirus, enterovirus, pestivirus, baculovirus, herpesvirus, Epstein Barr virus, papovavirus, poxvirus, vaccinia virus, and herpes simplex virus.

### III. Nanoparticle Compositions

[0426] In some embodiments, the gene editing system components described herein, including polypeptides of the disclosure (e.g., site-directed endonuclease, Cas nuclease) and nucleic acids of the disclosure, e.g., gRNA(s), a recombinant expression vector encoding the gRNA(s) and/or a site-directed endonuclease, mRNA encoding a site-directed endonuclease, are delivered to a host cell or a patient by a lipid nanoparticle (LNP).

[0427] In some embodiments, the system components are formulated, individually or combined together, in nanoparticles or other delivery vehicles, (e.g., polymeric nanoparticles) to facilitate cellular uptake and/or to protect them from degradation when delivered to a subject.

[0428] In some embodiments, a nanoparticle composition comprises a lipid. Lipid nanoparticles include, but are not limited to, liposomes and micelles. Any number of lipids may be present, including cationic and/or ionizable lipids, anionic lipids, neutral lipids, amphipathic lipids, conjugated lipids (e.g., PEGylated lipids), and/or structural lipids. Such lipids can be used alone or in combination.

[0429] Nanoparticles are ultrafine particles typically ranging between 1 and 100 to 500 nanometers (nm) in size with a surrounding interfacial layer and often exhibiting a size-related or size-dependent property. Nanoparticle compositions are myriad and encompass lipid nanoparticles (LNPs), liposomes (e.g., lipid vesicles), and lipoplexes. For example, a nanoparticle composition can be a liposome having a lipid bilayer with a diameter of 500 nm or less. In some embodiments, nanoparticle compositions are vesicles including one or more lipid bilayers. In certain embodiments, a nanoparticle composition includes two or more concentric bilayers separated by aqueous compartments. Lipid bilayers can be functionalized and/or crosslinked to one another. Lipid bilayers can include one or more ligands, proteins, or channels.

[0430] In some embodiments, the nanoparticle composition comprises a site-directed endonuclease mRNA, gRNAs targeting one or more target sequences, recombinant expression vector(s) encoding the site-directed endonuclease and/or gRNA(s), or RNP comprising the site-directed endonuclease and gRNA(s). In some embodiments, the mRNA and gRNA(s) are each separately formulated for delivery, e.g., in lipid nanoparticles. In some embodiments, the mRNA and gRNA(s) are co-formulated for delivery, e.g., in a lipid nanoparticle. In some embodiments, the recombinant expression vector encoding a site-directed endonuclease and a recombinant expression vector encoding the gRNA(s) are separately formulated for delivery, e.g., in lipid nanoparticles. In some embodiments, the recombinant expression vector encoding a site-directed endonuclease and a recombinant expression vector encoding the gRNA(s) are co-formulated for delivery, e.g., in lipid nanoparticles. In some embodiments, the recombinant expression vector encoding a site-directed endonuclease and gRNA(s) is formulated for delivery, e.g, in a lipid nanoparticle.

[0431] In some embodiments, the disclosure provides LNP compositions comprising: (a) one or more nucleic acid molecules (e.g., mRNA, gRNA, recombinant expression vector) described herein or RNP described herein; and (b) one or more lipid moieties selected from the group consisting of amino lipids, helper lipids, structural lipids, phospholipids, ionizable lipids, PEG lipids, lipoid, and cholesterol or cholesterol derivatives. In some embodiments, the disclosure provides LNP compositions comprising: (a) one or more nucleic acid molecules (e.g., mRNA, gRNA, recombinant expression vector) described herein or RNP described herein; and (b) one or more lipid moieties selected from the group consisting of ionizable lipids, amino lipids, anionic lipids, neutral lipids, amphipathic lipids, helper lipids, structural lipids, PEG lipids, and lipoids, and optionally (c) targeting moieties.

[0432] In some embodiments, the LNP composition comprise one or more lipid moieties promote or enhances cellular uptake by the apolipoprotein E (apoE)-low density lipoprotein receptor (LDLR) pathway. For example, certain ionizable lipids are known in the art for increasing cellular uptake of LNPs by the apoE-LDLR pathway (see, e.g., Semple, et al (2010) NAT BIOTECH 28:172). In some embodiments, the LNP composition comprises one or more lipid moieties that promote or enhances cellular uptake by an apoE-LDLR independent pathway.

[0433] In some embodiments, the LNPs of the present disclosure are formed by any method known in the art including, but not limited to, a continuous mixing method, a direct dilution process, and an in-line dilution process. Additional techniques and methods suitable for the preparation of the LNPs described herein include coacervation, microemulsions, supercritical fluid technologies, phase-inversion temperature (PIT) techniques.

### Pharmaceutical Compositions

[0434] In some embodiments, the disclosure provides pharmaceutical compositions comprising a gene editing system or system components described herein combined with an appropriate pharmaceutically acceptable carrier or diluent.

[0435] In some embodiments, the pharmaceutical composition comprises (1) one or more gRNAs described herein, and (2) a pharmaceutically acceptable carrier or diluent. In some embodiments, the pharmaceutical composition comprises (1) nucleic acid(s) encoding one or more gRNAs described herein, and (2) a pharmaceutically acceptable carrier or diluent. In some embodiments, the pharmaceutical composition comprises (1) recombinant expression vector(s) encoding one or more gRNAs described herein, and (2) a pharmaceutically acceptable carrier or diluent. In some embodiments, the pharmaceutical composition comprises one or more gRNAs, nucleic acid(s) encoding one or more gRNAs, or recombinant expression vector(s) (e.g., AAV) encoding one or more gRNAs formulated as a lipid composition (e.g., LNP), and (2) a pharmaceutically acceptable carrier or diluent. In some embodiments, the pharmaceutical composition comprises a therapeutically effective amount of the one or more gRNAs.

[0436] In some embodiments, the pharmaceutical composition comprises (1) a site-directed endonuclease (e.g., Cas nuclease) that is a polypeptide, and (2) a pharmaceutically acceptable carrier or diluent. In some embodiments, the pharmaceutical composition comprises (1) a nucleic acid molecule (e.g., mRNA) encoding a site-directed endonuclease (e.g., Cas nuclease), and (2) a pharmaceutically acceptable carrier or diluent. In some embodiments, the pharmaceutical composition comprises: (1) a recombinant expression vector (e.g., AAV) encoding a site-directed endonuclease (e.g., Cas nuclease), and (2) a pharmaceutically acceptable carrier or diluent. In some embodiments, the pharmaceutical composition comprises: (1) a site-directed endonuclease, a nucleic acid encoding a site-directed endonuclease, or a recombinant expression vector encoding the site-directed endonuclease formulated as a lipid composition (e.g., LNP), and (2) a pharmaceutically acceptable carrier or diluent. In some embodiments, the pharmaceutical composition comprises a therapeutically effective amount of the site-directed endonuclease.

[0437] In some embodiments, a pharmaceutical composition comprising the one or more gRNAs and the pharmaceutical composition comprising the site-directed endonuclease are the same pharmaceutical composition. In some embodiments, the pharmaceutical composition comprising the one or more gRNAs and the pharmaceutical composition comprising the site-directed endonuclease are different pharmaceutical compositions.

[0438] In some embodiments, the pharmaceutical composition comprises (1) (i) one or more gRNAs, (ii) a site-directed endonuclease (e.g., Cas nuclease) that is a polypeptide, and (2) a pharmaceutically acceptable carrier or diluent. In some embodiments, the pharmaceutical composition comprises (1), wherein (i) and (ii) are present as an RNP complex. In some embodiments, the RNP complex further comprises one or more cell penetrating peptides. In some embodiments, the pharmaceutical composition comprises (1), wherein (i) and/or (ii), or an RNP complex comprising (i) and (ii), are formulated as a lipid composition (e.g., LNP).

[0439] In some embodiments, the pharmaceutical composition comprises (1) (i) one or more gRNAs, (ii) a nucleic acid (e.g., mRNA) comprising a nucleotide sequence encoding a site-directed endonuclease (e.g., Cas nuclease), and (2) a pharmaceutically acceptable carrier or diluent. In some embodiments, the pharmaceutical composition comprises (1), wherein (i) and/or (ii) are formulated as a lipid composition (e.g., LNP).

[0440] In some embodiments, the pharmaceutical composition comprises (1) (i) one or more gRNAs, (ii) a recombinant expression vector (e.g., AAV) comprising a nucleotide sequence encoding a site-directed endonuclease (e.g., Cas nuclease), and (2) a pharmaceutically acceptable carrier or diluent. In some embodiments, the pharmaceutical composition comprises (1), wherein (i) and/or (ii) are formulated as a lipid composition (e.g., LNP).

[0441] In some embodiments, the pharmaceutical composition comprises (1) (i) a recombinant expression vector (e.g., AAV) comprising a nucleotide sequence encoding one or more gRNAs, (ii) a recombinant expression vector (e.g., AAV) comprising a nucleotide sequence encoding a site-directed endonuclease (e.g., Cas nuclease), and (2) a pharmaceutically acceptable carrier or diluent. In some embodiments, the recombinant expression vector of (i) and (ii) are the same recombinant expression vector. In some embodiments, the recombinant expression vector of (i) and (ii) are different recombinant expression vectors. In some embodiments, the recombinant expression vector(s) are formulated as a lipid composition (e.g., LNP).

[0442] Exemplary pharmaceutically acceptable excipients such as carriers, solvents, stabilizers, adjuvants, diluents, etc., depending upon the particular mode of administration and dosage form. Contemplated pharmaceutical compositions can be generally formulated to achieve a physiologically compatible pH, depending on the formulation and route of administration. In some embodiments, the compositions comprise a therapeutically effective amount of the one or more gRNAs, the site-directed endonuclease, the nucleic acid molecules, and/or the recombinant expression vectors, together with one or more pharmaceutically acceptable excipients.

[0443] Suitable excipients can include, for example, carrier molecules that include large, slowly metabolized macromolecules. Other exemplary excipients can include antioxidants, chelating agents, carbohydrates, stearic acid, liquids such as oils, water, saline, glycerol and ethanol, wetting or emulsifying agents, pH buffering substances, and the like.

[0444] Pharmaceutical compositions can be formulated into preparations in solutions, suppositories, injections. In some embodiments, the pharmaceutical composition is formulated to result in systemic administration of the one or more gRNAs, the site-directed endonuclease, the nucleic acid molecules, and/or the recombinant expression vectors, for example, following enteral or parenteral administration. In some embodiments, the pharmaceutical composition is formulated to result in localized administration of the one or more gRNAs, the site-directed endonuclease, the nucleic acid molecules, and/or the recombinant expression vectors, for example, following regional administration or implantation. In some embodiments, the pharmaceutical composition is formulated to result in localized administration to DRG (e.g., lumbar DRG) tissue following intra-DRG, intraneural, or intra-thecal administration or implantation. In some embodiments, the pharmaceutical composition is formulated for immediate activity or for sustained release of the one or more gRNAs, the site-directed endonuclease, the nucleic acid molecules, and/or the recombinant expression vectors.

[0445] In some embodiments, particularly wherein the pharmaceutical composition is formulated to target tissues of the central nervous system (CNS) following systemic administration, one more strategies are used to enable the components to cross the blood-brain barrier (BBB). For example, in some embodiments, the components (e.g., one or more gRNAs, site-directed endonuclease) are encoded by a delivery vehicle such as an AAV9 or derivatives thereof that result in passage through the BBB. One strategy for drug delivery through the BBB entails disruption of the BBB, either by osmotic means such as mannitol or leukotrienes, or biochemically using vasoactive substances such as bradykinin. In some embodiments, the BBB disrupting agent is co-administered with a pharmaceutical composition of the disclosure, e.g., by parenteral administration. Other strategies to go through the BBB entail the use of endogenous transport systems, including Caveolin-1 mediated transcytosis, carrier-mediated transporters such as glucose and amino acid carriers, receptor-mediated transcytosis for insulin or transferrin, and active efflux transporters such as p-glycoprotein. In some embodiments, active transport moieties are conjugated to the components (e.g., one or more gRNAs, site-directed endonuclease), or LNPs comprising the components, to facilitate transport across the endothelial wall of the blood vessel.

[0446] In some embodiments, a strategy for delivering the pharmaceutical composition behind the BBB comprises localized administration, for example by intrathecal delivery, e.g. through an Ommaya reservoir (see e.g. U.S. Pat. Nos. 5,222,982 and 5,385,582, incorporated herein by reference); by bolus injection, e.g. by a syringe, e.g. intravitreally or intracranially; by continuous infusion, e.g. by cannulation, e.g. with convection (see e.g. US Application No. 20070254842, incorporated here by reference); or by implanting a device upon which the agent has been reversibly affixed (see e.g. US Application Nos. 20080081064 and 20090196903, incorporated herein by reference).

[0447] Typically, an effective amount of a gene editing system comprising gRNA(s) and/or site-directed endonuclease described herein, or system components described herein, can be provided, for example, for use in a method of treating chronic pain. Methods of calculating the effective amount or effective dose are within the skill of one of ordinary skill in the art. The final amount to be administered is dependent upon the route of administration and upon the nature of the disorder that is to be treated. For example, in some embodiments, the final amount or dose of a gene editing system described herein is dependent upon the level of chronic pain experienced by the patient being treated. A competent clinician will be able to determine an effective amount of the gene editing system to administer to the patient to halt or reverse the progression of the disorder (e.g., to reduce or eliminate the level of chronic pain experienced by the patient).

[0448] In some embodiments, based on animal data (e.g., in animal models of acute inflammatory pain, post-surgical pain, osteoarthritic pain, neuropathic pain, and/or hypoalgesia), and other information available for the gene editing system, a clinician can determine the maximum safe dose for an individual, depending on the route of administration. For instance, an intravenously administered dose can be more than an intrathecally administered dose, given the greater body of fluid into which the therapeutic composition is being administered. Similarly, compositions which are rapidly cleared from the body can be administered at higher doses, or in repeated doses, in order to maintain a therapeutic concentration. Utilizing ordinary skill, the competent clinician will be able to optimize the dosage of a particular therapeutic in the course of routine clinical trials.

[0449] For inclusion in a medicament, a gene editing system comprising gRNA(s) and/or site-directed endonuclease described herein, or system components described herein, can be obtained from a suitable commercial source. In some embodiments, therapies based on a gene editing system comprising gRNA(s) and/or site-directed endonuclease described herein, or system components described herein, i.e. preparations of gRNA(s) and/or site-directed endonuclease to be used for therapeutic administration, must be sterile. Therapeutic compositions can be generally placed into a container having a sterile access port, for example, an intravenous solution bag or vial having a stopper pierceable by a hypodermic injection needle. In some embodiments, the therapeutic components are stored in unit or multi-dose containers, for example, sealed ampules or vials, as an aqueous solution or as a lyophilized formulation for reconstitution.

### Methods of Use

[0450] In some embodiments, the disclosure provides cellular, ex vivo, and in vivo methods comprising use of the nucleic acid(s), system(s), expression vector(s), delivery system(s), or pharmaceutical composition(s) described herein to create a gene edit in one or more target genes (e.g., FAAH and FAAH-OUT) in the genome. In some embodiments, the methods comprise use of a site-directed endonuclease (e.g., Cas nuclease) and one or more gRNAs described herein, to introduce a mutation within or proximal the coding sequence of FAAH and/or introduce a deletion comprising a region of FAAH-OUT, wherein the mutation and/or deletion modulates (e.g., decreases) FAAH expression. In some embodiments, the disclosure provides methods of treating a patient with a disease or condition (e.g., chronic pain), wherein the method comprises administering nucleic acid(s), system(s), expression vector(s), delivery system(s), or pharmaceutical composition(s) described herein to introduce the desired gene edit in the genome of a target cell population and/or target tissue.

### I. Cellular Genome Editing

[0451] In some embodiments, the method comprises introducing a nucleic acid(s), system(s), expression vector(s), delivery system(s), or pharmaceutical composition(s) described herein to a cell or cell population. In some embodiments, the method comprises contacting the cell with a nucleic acid, system, expression vector, delivery system, or pharmaceutical composition described herein. In some embodiments, the method comprises generating a stable cell line comprising a genomic DNA molecule edited using a system of gene editing described herein. In some embodiments, the cell is a eukaryotic cell. In some embodiments, the eukaryotic cell is a mammalian cell. In some embodiments, the eukaryotic cell is a rodent cell. In some embodiments, the eukaryotic cell is a human cell. In some embodiments, the cell is a patient-derived cell.

[0452] The nucleic acid(s), system(s), expression vector(s), delivery system(s), or pharmaceutical composition(s) described herein may be introduced into the cell via any methods known in the art, such as, e.g., viral or bacteriophage infection, transfection, conjugation, protoplast fusion, lipofection, electroporation, calcium phosphate precipitation, polyethyleneimine (PEI)-mediated transfection, DEAE-dextran-mediated transfection, liposome-mediated transfection, particle gun technology, calcium phosphate precipitation, shear-driven cell permeation, fusion to a cell-penetrating peptide followed by cell contact, microinjection, and nanoparticle-mediated delivery. In some embodiments, the vector system may be introduced into the cell via viral infection.

[0453] In some embodiments, the disclosure provides methods for inducing a double-stranded break (DSB) in a genomic DNA molecule, wherein the DSB is within or proximal one or more exons of the FAAH coding sequence in a cell, wherein repair of the DSB introduces a mutation in the FAAH coding sequence, and wherein the mutation disrupts FAAH expression in the cell. In some embodiments, the method comprises contacting the cell with one or more nucleic acid(s), system(s), expression vector(s), delivery system(s), or pharmaceutical composition(s) described herein comprising (i) a site-directed endonuclease and (ii) at least one gRNA directed to the FAAH gene; wherein when the system, the nucleic acid molecule, the expression vector, delivery system, or the pharmaceutical composition contacts the cell, the gRNA combines with the site-directed endonuclease to induce a mutation within or proximal one or more exons of the FAAH coding sequence, thereby resulting in reduced FAAH expression in the cell.

[0454] In some embodiments, the disclosure provides methods for inducing a deletion in a genomic DNA molecule comprising FAAH upstream FAAH-OUT, wherein the deletion disrupts FAAH-OUT and/or FAAH expression in the cell. In some embodiments, the method comprises contacting the cell with a one or more nucleic acid(s), system(s), expression vector(s), delivery system(s), or pharmaceutical composition(s) described herein comprising (i) a site-directed endonuclease; (ii) a first gRNA molecule comprising a spacer sequence corresponding to a first target sequence downstream the 3′ terminus of FAAH and upstream the transcriptional start site of FAAH-OUT in the genomic DNA molecule; and (iii) a second gRNA molecule comprising a spacer sequence corresponding to a second target sequence downstream the FAAH-OUT transcriptional start site and upstream exon 3 of FAAH-OUT in the genomic DNA molecule; wherein when the system, the nucleic acid molecule, the expression vector, the delivery system, or the pharmaceutical composition contacts the cell, the first and second gRNAs each independently combine with the site-directed endonuclease to induce a DSB proximal the first and second target sequences in the genomic DNA molecule, wherein the DSB proximal the first and second target sequences result in a deletion in the genomic DNA molecule, and wherein the deletion reduces results in reduced FAAH expression in the cell.

### II. In Vivo Genome Editing

[0455] Embodiments of the disclosure also encompass treating a patient with nucleic acid(s), system(s), expression vector(s), delivery system(s), or pharmaceutical composition(s) described herein. In some embodiments, the patient has chronic pain. Non-limiting examples of chronic pain include pain from conditions such as rheumatoid arthritis, peripheral neuropathy, idiopathic pain, or pain associated with cancer.

[0456] In some embodiments, the pain is nociceptive pain, neuropathic pain or inflammatory pain. In some embodiments, the nociceptive pain is due to a pathologically normal response to a noxious insult or injury of one or more tissues (e.g., skin tissue, muscle tissue, visceral organs, joints, tendons, bones). In some embodiments, the neuropathic pain is caused by damage or disease affecting the somatosensory nervous system. Non-limiting examples of such neuropathic pain include carpal tunnel syndrome, central pain syndrome, degenerative disc disease, diabetic neuropathy, phantom limb pain, shingles, pudendal neuralgia, sciatic, and trigeminal neuralgia. In some embodiments, neuropathic pain is associated with a disease or disorder, such as cancer, multiple sclerosis, kidney disease, infectious disease, spinal cord injury. In some embodiments, the neuropathic pain is post-surgical pain. In some embodiments, the pain is inflammatory pain caused by activation of nociceptive pathways as a result of tissue inflammation. Non-limiting examples of inflammatory pain include osteoarthritis, rheumatoid arthritis, Chron's disease, and fibromyalgia.

[0457] As used herein, “treating” a patient with chronic pain refers to a prevention of pain, a reduction or prevention of the development or progression of pain, and/or a reduction or elimination of existing pain. In some embodiments, a method of the disclosure is performed prior to or shortly after the onset of pain. In some embodiments, the method is performed following an extended duration of pain. In some embodiments, the method is performed in order to delay or prevent the onset of pain.

[0458] In some embodiments, the methods described herein are for use in treating a patient having a neurological disorder, such as anxiety, depression, or post traumatic stress disorders. In some embodiments, the methods described herein are for use in reducing or eliminating acute pain, for example, due to a wound or wound repair.

[0459] In some embodiments, the disclosure provides methods for treating a subject in need thereof (e.g., a subject with chronic pain) by reducing FAAH expression in a target tissue or cell population, the method comprising administering an effective amount of one or more nucleic acid(s), system(s), expression vector(s), delivery system(s), or pharmaceutical composition(s) described herein comprising (i) a site-directed endonuclease and (ii) at least one gRNA directed to the FAAH gene; wherein when the system, the nucleic acid molecule, the expression vector, the delivery system, or the pharmaceutical composition is administered, the gRNA combines with the site-directed endonuclease to induce a mutation within or proximal one or more exons of the FAAH coding sequence, thereby resulting in reduced FAAH expression in the target tissue or cell population.

[0460] In some embodiments, the disclosure provides methods for treating a subject in need thereof (e.g., a subject with chronic pain) by reducing FAAH expression in a target tissue or cell population, the method comprising administering an effective amount of one or more nucleic acid(s), system(s), expression vector(s), delivery system(s), or pharmaceutical composition(s) described herein comprising (i) a site-directed endonuclease; (ii) a first gRNA molecule comprising a spacer sequence corresponding to a first target sequence downstream the 3′ terminus of FAAH and upstream the transcriptional start site of FAAH-OUT in the genomic DNA molecule; and (iii) a second gRNA molecule comprising a spacer sequence corresponding to a second target sequence downstream the FAAH-OUT transcriptional start site and upstream exon 3 of FAAH-OUT in the genomic DNA molecule; wherein when the system, the nucleic acid molecule, the expression vector, the delivery system, or the pharmaceutical composition is administered, the first and second gRNAs each independently combine with the site-directed endonuclease to induce a DSB proximal the first and second target sequences in the genomic DNA molecule, wherein the DSB proximal the first and second target sequences result in a deletion in the genomic DNA molecule, and wherein the deletion reduces results in reduced FAAH expression in the target tissue or cell population.

### A. Administration

[0461] In some embodiments, the disclosure provides methods for modulating (e.g., decreasing) FAAH expression and/or activity in a subject in need thereof (e.g., a subject with chronic pain), the method comprising administering components of a gene editing system for editing FAAH and/or FAAH-OUT, or a pharmaceutical composition thereof, as described herein, wherein the components are administered together (e.g., sequentially or simultaneously).

[0462] In some embodiments, the target cell population or target tissue is any cell population or tissue known to express FAAH. For example, FAAH is highly expressed in multiple tissue types, including brain, small intestine, pancreas, skeletal muscle, and testis. Additionally, FAAH is further expressed in kidney, liver, lung, placenta, immune cells, and prostate tissue (see, e.g., Wei et al (2006) J BIOL CHEM 281:36569). FAAH is also expressed in adipose tissue, adrenal gland, bone marrow, fallopian, ovary, pituitary gland, rectum, stomach, thyroid, and tonsil tissues (see, eg., EMBL-EBI Expression Atlas Reference No. 30777892; Wang et al (2019) MOL SYSTEMS BIOL 15:e8503).

[0463] In some embodiments, the target tissue or cell population is found in the brain. In some embodiments, the target tissue or cell population is found in a dorsal root ganglion (DRG), for example, the lumbar DRG. In some embodiments, the target cell population are neurons. In some embodiments, the target cell population are sensory neurons, for example, sensory neurons of the DRG (e.g., lumbar DRG).

[0464] In some embodiments, the route of administration is any considered sufficient for delivery (e.g., localized delivery) of a gene-editing system described herein, or pharmaceutical composition thereof, to a desired target cell population (e.g., neurons) or target tissue (e.g., brain or DRG tissue) as ascertained by one of skill in the art. In some embodiments, the route of administration for delivery (e.g., localized delivery) of a gene-editing system described herein, or pharmaceutical composition thereof, to neurons of the DRG (e.g., lumbar DRG), is intra-DRG, intraneural, or intrathecal.

[0465] In some embodiments, the method comprises administering the system components by the same or different routes of administration. For example, in some embodiments, such as those for inducing a mutation within or proximal the FAAH coding sequence or for inducing a deletion comprising a region of FAAH-OUT, the gRNA(s) are administered by the same or different routes of administration as the site-directed endonuclease.

### B. Therapeutic Effects

[0466] In some embodiments, administration of the nucleic acid(s), system(s), expression vector(s), delivery system(s), or pharmaceutical composition(s) described herein results in a mutation comprising an insertion, deletion, or substitution of one or more nucleotides of a target gene (e.g., FAAH and/or FAAH-OUT) in a genomic DNA molecule in the patient, for example, in a target cell population and/or target tissue. In some embodiments, the mutation results in one or more amino acid changes in a protein expressed from the target gene, for example one or more amino acid changes in a FAAH-OUT and/or FAAH polypeptide expressed from the target gene. In some embodiments, the mutation results in one or more nucleotide changes in an RNA expressed from the target gene, such as an RNA expressed from the FAAH and/or FAAH-OUT target gene. In some embodiments, the mutation alters the expression level of the target gene, for example, altering or decreasing the expression level of FAAH and/or FAAH-OUT. In some embodiments, the mutation results in gene knockdown in the patient, for example, a gene knockdown of FAAH and/or FAAH-OUT. In some embodiments, the administration of the nucleic acid(s), system(s), expression vector(s), delivery system(s), or pharmaceutical composition(s) described herein results in a mutation (e.g., insertion, deletion) of an exon sequence, an intron sequence, a transcriptional control sequence, a translational control sequence, or a non-coding sequence of target gene (e.g. FAAH and/or FAAH-OUT).

[0467] In some embodiments, administration of the nucleic acid(s), system(s), expression vector(s), delivery system(s), or pharmaceutical composition(s) described herein results in deletion of a genomic DNA molecule comprising at least a portion of FAAH-OUT in a subject. Methods of measuring a deletion in a genome (e.g., an approximately 2-10 kb deletion comprising at least a portion of FAAH-OUT) are known in the art, and include, long-range PCR, digital droplet PCR (ddPCR), Anchor-Seq, and long-read sequencing.

[0468] In some embodiments, administration of the nucleic acid(s), system(s), expression vector(s), delivery system(s), or pharmaceutical composition(s) described herein results in decreased FAAH expression and/or activity in a subject. In some embodiments, a decrease in FAAH expression is measured as decreased expression of FAAH mRNA, FAAH polypeptide, or both. In some embodiments, a decrease in FAAH activity is measured as decreased catalytic hydrolysis of one or more FAAH substrates, e.g., AEA, OEA, or PEA.

[0469] In some embodiments, the level of FAAH expression (e.g., expression of FAAH mRNA and/or polypeptide) is decreased at least 10%, at least 15%, at least 20%, at least 25%, at least 30%, at least 35%, at least 40%, at least 45%, at least 50%, at least 55%, at least 60%, at least 65%, at least 70%, at least 75%, or at least 80%, for example, relative to FAAH expression prior to the genome editing.

[0470] In some embodiments, FAAH expression is decreased in one or more tissues of a subject, including any tissue known to express FAAH. In some embodiments, FAAH expression is decreased in one or more regions of the brain (e.g., cerebral cortex, cerebellum, hippocampus). In some embodiments, FAAH expression is decreased in the thyroid gland, the adrenal gland, intestinal tissue, lung tissue, the esophagus, stomach tissue, a urinary tissue, a reproductive tissue, kidney tissue, liver tissue, or skin tissue.

[0471] Methods of measuring FAAH mRNA and/or polypeptide expression in a tissue are known in the art. A non-limiting exemplary method for measuring FAAH mRNA expression level in a tissue in a subject comprises obtaining a tissue sample from a subject (e.g., a biopsy tissue sample), isolating RNA from the tissue sample, and quantifying FAAH mRNA using quantitative PCR (qPCR) or digital droplet PCR, and in-situ hybridization. A non-limiting exemplary method for measuring FAAH polypeptide expression levels in a tissue in a subject comprises obtaining a tissue sample from a subject (e.g., a biopsy tissue sample), isolating protein from the tissue sample, and quantifying FAAH polypeptide using western blot, ELISA or LC-MS.

[0472] In some embodiments, decreased FAAH expression and/or activity results in increased levels of one or more FAAH substrates in the subject. In some embodiments, the level of the one or more FAAH substrates is increased relative to an untreated subject or to a subject prior to genomic editing. In some embodiments, the FAAH substrate is an N-acyl ethanolamine. In some embodiments, the FAAH substrate is an N-acyl taurine. In some embodiments, the FAAH substrate is oleamide. In some embodiments, the FAAH substrate that is an N-acyl ethanolamine is selected from AEA, PEA, and OEA.

[0473] In some embodiments, the one or more FAAH substrates is increased by about 30%, about 35%, about 40%, about 45%, about 50%, about 55%, about 60%, about 65%, about 70%, about 75%, about 80%, about 85%, about 90% or about 100%. In some embodiments, the one or more FAAH substrates is increased by about 1.1-fold, about 1.2-fold, about 1.3-fold, about 1.4-fold, about 1.5-fold, about 1.6-fold, about 1.7-fold, about 1.8-fold, about 1.9-fold, about 2-fold, about 2.5-fold, about 3-fold, about 3.5-fold, about 4-fold, about 4.5-fold, or about 5-fold. Methods of measuring the level of a FAAH substrate in a sample are known in the art. Non-limiting exemplary methods include obtaining a tissue sample (e.g., a blood sample) from a subject, and measuring level of a FAAH substrate (e.g., AEA, PEA, OEA) using LCMS.

[0474] In some embodiments, the disclosure provides methods of in vivo genomic editing for modulating (e.g., decreasing) FAAH expression and/or activity in a subject, wherein the method results in an analgesic effect (e.g., decreased pain). Methods of measuring reduction or elimination of pain in a subject are known in the art. Non-limiting examples of methods to measure pain include quantitative sensory testing (QTS), the McGill pain questionnaire, or the McGill pain index.

### C. Combination Therapy

[0475] In some embodiments, the method is used as a single therapy or in combination with other therapies available in the art.

[0476] In some embodiments, a gene editing system described herein is combined with one more inhibitors of FAAH and any pain medication known in the art and approved for human use.

[0477] Several classes of FAAH inhibitors are known (see, e.g., Deng, et al (2010) EXPERT OPIN DRUG DISC 5:961). These inhibitors include covalent irreversible inhibitors, covalent reversible inhibitors, and noncovalent reversible inhibitors.

[0478] Non-limiting examples of covalent reversible inhibitors include alpha-ketoheterocycles (see, e.g., Boger, et al (2000) PNAS 97:5044; Leung et al (2003) NAT BIOTECHNOL 21:687).

[0479] Non-limiting examples of covalent irreversible inhibitors include N-piperdine/N-piperazine carboxamides (see, e.g., Ahn, et al (2007) BIOCHEM 46:13019; Ahn et al (2009) CHEM BIOL 16:411; Johnson, et al (2009) BIOORG MED CHEM LETT 19:2865; Keith, et al (2008) BIOORG MED CHEM LETT 18:4838), carbamates (see, e.g., Timmons, et al (2008) BIOORG MED CHEM LETT 18:2109; Tarzia, et al (200) J MED CHEM 46:2352; Mor et al (2004) J MED CHEM 47:4998). Piperdine-based or piperazine-based urea derivatives that function as FAAH inhibitors are further disclosed by WO2009/127943 and WO2006/054652.

[0480] Non-limiting examples of noncovalent reversible inhibitors include ketobenzimidazoles (see, e.g., Min et al (2011) PNAS 108:7379).

### Kits

[0481] The present disclosure provides kits for carrying out the methods described herein. In some embodiments, the kit includes one or more gRNAs, nucleic acid(s) encoding the one or more gRNAs, a site-directed polypeptide, a nucleic acid encoding a site-directed polypeptide, recombinant expression vector(s) comprising the nucleic acids, delivery systems and/or any nucleic acid or proteinaceous molecule necessary to carry out the aspects of the methods described herein, or any combination thereof.

[0482] In some embodiments, a kit for use in the present disclosure comprises: (1) one or more gRNAs, and (2) reagents for reconstitution and/or dilution of (1). In some embodiments, a kit for use in the present disclosure comprises: (1) nucleic acid (s) encoding one or more gRNAs, and (2) reagents for reconstitution and/or dilution of (1). In some embodiments, a kit for use in the present disclosure comprises: (1) recombinant expression vector(s) encoding one or more gRNAs, and (2) reagents for reconstitution and/or dilution of (1). In some embodiments, a kit for use in the present disclosure comprises: (1) one or more gRNAs, nucleic acid(s) encoding one or more gRNAs, or recombinant expression vector(s) encoding one or more gRNAs formulated as an LNP, and (2) reagents for reconstitution and/or dilution of (1).

[0483] In some embodiments, a kit for use in the present disclosure comprises: (1) a site-directed endonuclease that is a polypeptide, and (2) reagents for reconstitution and/or dilution of (1). In some embodiments, a kit for use in the present disclosure comprises: (1) an mRNA encoding a site-directed endonuclease, and (2) reagents for reconstitution and/or dilution of (1). In some embodiments, a kit for use in the present disclosure comprises: (1) a recombinant expression vector encoding a site-directed endonuclease, and (2) reagents for reconstitution and/or dilution of (1). In some embodiments, a kit for use in the present disclosure comprises: (1) a site-directed endonuclease or a nucleic acid encoding a site-directed endonuclease formulated as an LNP, and (2) reagents for reconstitution and/or dilution of (1).

[0484] In some embodiments, a kit for use in the present disclosure comprises: (1) (i) one or more gRNAs, (ii) an mRNA comprising a nucleotide sequence encoding a site-directed endonuclease, and (2) reagents for reconstitution and/or dilution of (i) and (ii).

[0485] In some embodiments, a kit for use in the present disclosure comprises: (1) (i) one or more gRNAs, (ii) a site-directed endonuclease polypeptide, and (2) reagents for reconstitution and/or dilution of (i) and (ii).

[0486] In some embodiments, a kit for use in the present disclosure comprises: (1) a recombinant expression vector comprising a nucleotide sequence encoding one or more gRNAs, and (2) a reagent for reconstitution and/or dilution of the recombinant expression vector(s).

[0487] In some embodiments, a kit for use in the present disclosure comprises: (1) a nucleotide sequence encoding a site-directed endonuclease, and (2) a reagent for reconstitution and/or dilution of the recombinant expression vector(s).

[0488] In some embodiments, a kit for use in the present disclosure comprises: (1) a recombinant expression vector comprising (i) a nucleotide sequence encoding one or more gRNAs (ii) nucleotide sequence encoding a site-directed endonuclease, and (2) a reagent for reconstitution and/or dilution of the recombinant expression vector(s).

[0489] Components of a kit can be in separate containers, or combined in a single container.

[0490] Any kit described above can further comprise one or more additional reagents, where such additional reagents are selected from a buffer, a buffer for introducing a polypeptide or polynucleotide into a cell, a wash buffer, a control reagent, a control vector, a control RNA polynucleotide, a reagent for in vitro production of the polypeptide from DNA, adaptors for sequencing and the like. A buffer can be a stabilization buffer, a reconstituting buffer, a diluting buffer, or the like. A kit can also comprise one or more components that can be used to facilitate or enhance the on-target binding or the cleavage of DNA by the site-directed endonuclease, or improve the specificity of targeting.

[0491] In addition to the above-mentioned components, a kit can further comprise instructions for using the components of the kit to practice the methods. The instructions for practicing the methods can be recorded on a suitable recording medium. For example, the instructions can be printed on a substrate, such as paper or plastic, etc. The instructions can be present in the kits as a package insert, in the labeling of the container of the kit or components thereof (i.e., associated with the packaging or subpackaging), etc. The instructions can be present as an electronic storage data file present on a suitable computer readable storage medium, e.g. CD-ROM, diskette, flash drive, etc. In some instances, the actual instructions are not present in the kit, but means for obtaining the instructions from a remote source (e.g. via the Internet), can be provided. An example of this case is a kit that comprises a web address where the instructions can be viewed and/or from which the instructions can be downloaded. As with the instructions, this means for obtaining the instructions can be recorded on a suitable substrate.

### Definitions

[0492] It must be noted that, as used in the specification and the appended claims, the singular forms “a,” “an” and “the” include plural referents unless the context clearly dictates otherwise. Further, unless otherwise required by context, singular terms shall include pluralities and plural terms shall include the singular.

[0493] As used herein, the term “about” (alternatively “approximately”) will be understood by persons of ordinary skill and will vary to some extent depending on the context in which it is used. If there are uses of the term which are not clear to persons of ordinary skill given the context in which it is used, “about” will mean up to plus or minus 10% of the particular value.

[0494] As used herein, the term “base pair” refers to two nucleobases on opposite complementary polynucleotide strands, or regions of the same strand, that interact via the formation of specific hydrogen bonds. As used herein, the term “Watson-Crick base pairing”, used interchangeably with “complementary base pairing”, refers to a set of base pairing rules, wherein a purine always binds with a pyrimidine such that the nucleobase adenine (A) forms a complementary base pair with thymine (T) and guanine (G) forms a complementary base pair with cytosine (C) in DNA molecules. In RNA molecules, thymine is replaced by uracil (U), which, similar to thymine (T), forms a complementary base pair with adenine (A). The complementary base pairs are bound together by hydrogen bonds and the number of hydrogen bonds differs between base pairs. As in known in the art, guanine (G)-cytosine (C) base pairs are bound by three (3) hydrogen bonds and adenine (A)-thymine (T) or uracil (U) base pairs are bound by two (2) hydrogen bonds.

[0495] As used herein, the term “codon” refers to a sequence of three nucleotides that together form a unit of genetic code in a DNA or RNA molecule. A codon is operationally defined by the initial nucleotide from which translation starts and sets the frame for a run of successive nucleotide triplets, which is known as an “open reading frame” (ORF). For example, the string GGGAAACCC, if read from the first position, contains the codons GGG, AAA, and CCC; if read from the second position, it contains the codons GGA and AAC; and if read from the third position, GAA and ACC. Thus, every nucleic sequence read in its 5′→3′ direction comprises three reading frames, each producing a possibly distinct amino acid sequence (in the given example, Gly-Lys-Pro, Gly-Asn, or Glu-Thr, respectively). DNA is double-stranded defining six possible reading frames, three in the forward orientation on one strand and three reverse on the opposite strand. Open reading frames encoding polypeptides are typically defined by a start codon, usually the first AUG codon in the sequence.

[0496] The term “induces a mutation” refers to an incorporation of an alteration by a gene-editing system described herein that results in a change of one or more nucleotides in a genomic DNA molecule such that expression of the genomic DNA is altered in a desired manner. In some embodiments, the induction of a mutation is for therapeutic purposes or results in a therapeutic effect (e.g., modulation of FAAH expression and/or activity).

[0497] As used herein, the term “complementary” or “complementarity” refers to a relationship between the sequence of nucleotides comprising two polynucleotide strands, or regions of the same polynucleotide strand, and the formation of a duplex comprising the strands or regions, wherein the extent of consecutive base pairing between the two strands or regions is sufficient for the generation of a duplex structure. It is known that adenine (A) forms specific hydrogen bonds, or “base pairs”, with thymine (T) or uracil (U). Similarly, it is known that a cytosine (C) base pairs with guanine (G). It is also known that non-canonical nucleobases (e.g., inosine) can hydrogen bond with natural bases. A sequence of nucleotides comprising a first strand of a polynucleotide, or a region, portion or fragment thereof, is said to be “sufficiently complementary” to a sequence of nucleotides comprising a second strand of the same or a different nucleic acid, or a region, portion, or fragment thereof, if, when the first and second strands are arranged in an antiparallel fashion, the extent of base pairing between the two strands maintains the duplex structure under the conditions in which the duplex structure is used (e.g., physiological conditions in a cell). It should be understood that complementary strands or regions of polynucleotides can include some base pairs that are non-complementary. Complementarity may be “partial,” in which only some of the nucleobases comprising the polynucleotide are matched according to base pairing rules. Or, there may be “complete” or “total” complementarity between the nucleic acids. Although the degree of complementarity between polynucleotide strands or regions has significant effects on the efficiency and strength of hybridization between the strands or regions, it is not required for two complementary polynucleotides to base pair at every nucleotide position. In some embodiments, a first polynucleotide is 100% or “fully” complementary to a second polynucleotide and thus forms a base pair at every nucleotide position. In some embodiments, a first polynucleotide is not 100% complementary (e.g., is 90%, or 80% or 70% complementary) and contains mismatched nucleotides at one or more nucleotide positions. While perfect complementarity is often desired, some embodiments can include one or more but preferably 6, 5, 4, 3, 2, or 1 mismatches.

[0498] As used herein, the term “contacting” means establishing a physical connection between two or more entities. For example, contacting a cell with an agent (e.g., a nucleic acid molecule, a system, a lipid nanoparticle composition, or pharmaceutical composition of the disclosure) means that the cell and the agent are made to share a physical connection. Methods of contacting cells with external entities both in vivo, in vitro, and ex vivo are well known in the biological arts. In exemplary embodiments of the disclosure, the step of contacting a mammalian cell with a composition (e.g a nucleic acid molecule, a system, a lipid nanoparticle composition, or pharmaceutical composition of the disclosure) is performed in vivo. For example, contacting a lipid nanoparticle composition and a cell (for example, a mammalian cell) which may be disposed within an organism (e.g., a mammal) may be performed by any suitable administration route (e.g., parenteral administration to the organism, including intravenous, intramuscular, intradermal, and subcutaneous administration). For a cell present in vitro, a composition (e.g., a nucleic acid molecule, a system, a lipid nanoparticle composition, or pharmaceutical composition of the disclosure) and a cell may be contacted, for example, by adding the composition to the culture medium of the cell and may involve or result in transfection. Moreover, more than one cell (e.g., a population of cells) may be contacted by an agent described herein.

[0499] As used herein, the term “culture” can be used interchangeably with the terms “culturing”, “grow”, “growing”, “maintain”, “maintaining”, “expand”, “expanding” when referring to a cell culture or the process of culturing. The term refers to a cell (e.g., a primary cell) that is maintained outside its normal environment (e.g., a tissue in a living organism) under controlled conditions. Cultured cells are treated in a manner that enables survival. Culturing conditions can be modified to alter cell growth, homeostasis, differentiation, division, or a combination thereof in a controlled and reproducible manner. The term does not imply that all cells in the culture survive, grow, or divide as some may die, enter a state of quiescence, or enter a state of senescence. Cells are typically cultured in media, which can be changed during the course of the culture. Components can be added to the media or environmental factors (e.g., temperature, humidity, atmospheric gas levels) to promote cell survival, growth, homeostasis, division, or a combination thereof.

[0500] As used herein the term, “double-strand break” (DSB) refers to a DNA lesion generated when the two complementary strands of a DNA molecule are broken or cleaved, resulting in two free DNA ends or termini DSBs may occur via exposure to environmental insults (e.g., irradiation, chemical agents, or UV light) or generated deliberately (e.g., via a system comprising a site-directed endonuclease) and for a defined biological purpose (e.g., to induce a mutation in a genomic DNA molecule).

[0501] As used herein, the term “effective dose” or “effective dosage” is defined as an amount sufficient to achieve or at least partially achieve the desired effect.

[0502] As used herein, the term “genome editing”, “gene-editing” and “genomic editing” are used interchangeably, and generally refer to the process of editing or changing the nucleotide sequence of a genome, preferably in a precise or predetermined manner Examples of methods of genome editing described herein include methods of using site-directed endonucleases to cut genomic DNA at a precise target location or sequence within a genome, thereby creating a DNA break (e.g., a DSB) within the target sequence, and repairing the DNA break such that the nucleotide sequence of the repaired genome has been changed at or near the site of the DNA break.

[0503] Double-strand DNA breaks (DSBs) can be and regularly are repaired by natural, endogenous cellular processes such as homology-directed repair (HDR) and non-homologous end-joining (NHEJ) (see e.g., Cox et al., (2015) Nature Medicine 21(2):121-131).

[0504] As used herein, a subject “in need of prevention,” “in need of treatment,” or “in need thereof,” refers to one, who by the judgment of an appropriate medical practitioner (e.g., a doctor, a nurse, or a nurse practitioner in the case of humans; a veterinarian in the case of non-human mammals), would reasonably benefit from a given treatment.

[0505] As used herein, an “insertion” or an “addition” refers to a change in an amino acid or nucleotide sequence resulting in the addition of one or more amino acid residues or nucleotides, respectively, to a molecule as compared to a reference sequence, for example, the sequence found in a naturally-occurring molecule (e.g., a wild-type gene allele).

[0506] As used herein, the term “intron” refers to any nucleotide sequence within a gene that is removed by RNA splicing mechanisms during maturation of the final RNA product (e.g., an mRNA). An intron refers to both the DNA sequence within a gene and the corresponding sequence in a RNA transcript (e.g., a pre-mRNA). Sequences that are joined together in the final mature RNA after RNA splicing are “exons”. As used herein, the term “intronic sequence” refers to a nucleotide sequence comprising an intron or a portion of an intron. Introns are found in the genes of most eukaryotic organisms and can be located in a wide range of genes, including those that generate proteins, ribosomal RNA (rRNA), and transfer RNA (tRNA). When proteins are generated from intron-containing genes, RNA splicing takes place as part of the RNA processing pathway that follows transcription and precedes translation.

[0507] As used herein, the term “lipid” refers to a small molecule that has hydrophobic or amphiphilic properties. Lipids may be naturally occurring or synthetic. Examples of classes of lipids include, but are not limited to, fats, waxes, sterol-containing metabolites, vitamins, fatty acids, glycerolipids, glycerophospholipids, sphingolipids, saccharolipids, and polyketides, and prenol lipids. In some instances, the amphiphilic properties of some lipids leads them to form liposomes, vesicles, or membranes in aqueous media.

[0508] As used herein, an “mRNA” refers to a messenger ribonucleic acid. An mRNA may be naturally or non-naturally occurring or synthetic. For example, an mRNA may include modified and/or non-naturally occurring components such as one or more nucleobases, nucleosides, nucleotides, or linkers. An mRNA may include a cap structure, a 5′ transcript leader, a 5′ untranslated region, an initiator codon, an open reading frame, a stop codon, a chain terminating nucleoside, a stem-loop, a hairpin, a polyA sequence, a polyadenylation signal, and/or one or more cis-regulatory elements. An mRNA may have a nucleotide sequence encoding a polypeptide. Translation of an mRNA, for example, in vivo translation of an mRNA inside a mammalian cell, may produce a polypeptide. Traditionally, the basic components of a natural mRNA molecule include at least a coding region, a 5′-untranslated region (5′-UTR), a 3′UTR, a 5′ cap and a polyA sequence.

[0509] As used herein, the term “naturally occurring” as applied to an object refers to the fact that an object can be found in nature. For example, a polypeptide or polynucleotide sequence (e.g., a splice site), or components thereof such as amino acids or nucleotides, that is present in an organism (including viruses) that can be isolated from a source in nature and which has not been intentionally modified by man in the laboratory is naturally occurring.

[0510] As used herein, the term “nucleic acid” refers to deoxyribonucleotides or ribonucleotides and polymers or oligomers thereof in either single- or double-stranded form. Unless specifically limited, the term encompasses nucleic acids containing known analogues of natural nucleotides that have similar binding properties as the reference nucleic acid and are metabolized in a manner similar to naturally occurring nucleotides. Polymers of nucleotides are referred to as “polynucleotides”.

[0511] As used herein, a nucleic acid, or fragment or portion thereof, such as a polynucleotide or oligonucleotide is “operably linked” when it is placed into a functional relationship with another nucleic acid sequence, or fragment or portion thereof.

[0512] As used herein, “parenteral administration,” “administered parenterally,” and other grammatically equivalent phrases, refer to modes of administration other than enteral and topical administration, usually by injection, and include, without limitation, intravenous, intranasal, intraocular, intramuscular, intraarterial, intrathecal, intracapsular, intraorbital, intracardiac, intradermal, intraperitoneal, transtracheal, subcutaneous, subcuticular, intraarticular, subcapsular, subarachnoid, intraspinal, epidural, intracerebral, intracranial, intracarotid and intrasternal injection and infusion.

[0513] As used herein, the term “percent identity,” in the context of two or more nucleic acid or polypeptide sequences, refers to two or more sequences or subsequences that have a specified percentage of nucleotides or amino acid residues that are the same, when compared and aligned for maximum correspondence, as measured using one of the sequence comparison algorithms described below (e.g., BLASTP and BLASTN or other algorithms available to persons of skill) or by visual inspection. Depending on the application, the “percent identity” can exist over a region of the sequence being compared, e.g., over a functional domain, or, alternatively, exist over the full length of the two sequences to be compared. For sequence comparison, typically one sequence acts as a reference sequence to which test sequences are compared. When using a sequence comparison algorithm, test and reference sequences are input into a computer, subsequence coordinates are designated, if necessary, and sequence algorithm program parameters are designated. The sequence comparison algorithm then calculates the percent sequence identity for the test sequence(s) relative to the reference sequence, based on the designated program parameters. The percent identity between two sequences is a function of the number of identical positions shared by the sequences (i.e., % homology=# of identical positions/total # of positions×100), taking into account the number of gaps, and the length of each gap, which need to be introduced for optimal alignment of the two sequences. The comparison of sequences and determination of percent identity between two sequences can be accomplished using a mathematical algorithm, as described in the non-limiting examples below.

[0514] Optimal alignment of sequences for comparison can be conducted, e.g., by the local homology algorithm of Smith & Waterman, Adv. Appl. Math. 2:482 (1981), by the homology alignment algorithm of Needleman & Wunsch, J. Mol. Biol. 48:443 (1970), by the search for similarity method of Pearson & Lipman, Proc. Nat'l. Acad. Sci. USA 85:2444 (1988), by computerized implementations of these algorithms (GAP, BESTFIT, FASTA, and TFASTA in the Wisconsin Genetics Software Package, Genetics Computer Group, 575 Science Dr., Madison, Wis.), or by visual inspection (see generally Ausubel et al., infra).

[0515] One example of an algorithm that is suitable for determining percent sequence identity and sequence similarity is the BLAST algorithm, which is described in Altschul et al., J. Mol. Biol. 215:403-410 (1990). Software for performing BLAST analyses is publicly available through the National Center for Biotechnology Information website. The percent identity between two nucleotide sequences can be determined using the GAP program in the GCG software package (available at http://www.gcg.com), using a NWSgapdna.CMP matrix and a gap weight of 40, 50, 60, 70, or 80 and a length weight of 1, 2, 3, 4, 5, or 6. The percent identity between two nucleotide or amino acid sequences can also be determined using the algorithm of E. Meyers and W. Miller (CABIOS, 4:11-17 (1989)) which has been incorporated into the ALIGN program (version 2.0), using a PAM120 weight residue table, a gap length penalty of 12 and a gap penalty of 4. In addition, the percent identity between two amino acid sequences can be determined using the Needleman and Wunsch (J. Mol. Biol. (48):444-453 (1970)) algorithm which has been incorporated into the GAP program in the GCG software package (available at http://www.gcg.com), using either a Blossum 62 matrix or a PAM250 matrix, and a gap weight of 16, 14, 12, 10, 8, 6, or 4 and a length weight of 1, 2, 3, 4, 5, or 6.

[0516] The nucleic acid and protein sequences of the present disclosure can further be used as a “query sequence” to perform a search against public databases to, for example, identify related sequences. Such searches can be performed using the NBLAST and XBLAST programs (version 2.0) of Altschul, et al. (1990) J. Mol. Biol. 215:403-10. BLAST nucleotide searches can be performed with the NBLAST program, score=100, wordlength=12 to obtain nucleotide sequences homologous to the nucleic acid molecules of the invention. BLAST protein searches can be performed with the XBLAST program, score=50, wordlength=3 to obtain amino acid sequences homologous to the protein molecules of the invention. To obtain gapped alignments for comparison purposes, Gapped BLAST can be utilized as described in Altschul et al., (1997) Nucleic Acids Res. 25(17):3389-3402. When utilizing BLAST and Gapped BLAST programs, the default parameters of the respective programs (e.g., XBLAST and NBLAST) can be used.

[0517] As used herein, the term “pharmaceutically acceptable” refers to those compounds, materials, compositions, and/or dosage forms which are, within the scope of sound medical judgment, suitable for use in contact with the tissues, organs, and/or bodily fluids of human beings and animals without excessive toxicity, irritation, allergic response, or other problems or complications commensurate with a reasonable benefit/risk ratio.

[0518] As used herein, the term “pharmaceutically acceptable carrier” refers to, and includes, any and all solvents, dispersion media, coatings, antibacterial and antifungal agents, isotonic and absorption delaying agents, and the like that are physiologically compatible. The compositions can include a pharmaceutically acceptable salt, e.g., an acid addition salt or a base addition salt (see, e.g., Berge et al. (1977) J Pharm Sci 66:1-19).

[0519] As used herein, the terms “polypeptide,” “peptide”, and “protein” are used interchangeably to refer to a polymer of amino acid residues. The terms apply to amino acid polymers in which one or more amino acid residue is an artificial chemical mimetic of a corresponding naturally occurring amino acid, as well as to naturally occurring amino acid polymers and non-naturally occurring amino acid polymer.

[0520] As used herein, the term “site-directed endonuclease” refers to a nuclease for use with a CRISPR/Cas system (e.g., Cas9) that recognizes a specific target sequence in a DNA molecule (e.g., a genomic DNA molecule) and generates a DNA break (e.g., a DSB) within the DNA molecule at, near or within the target sequence, when combined with a gRNA molecule comprising a spacer sequence corresponding to the target sequence. After creation of the DNA break, the cellular DNA repair machinery is co-opted to repair the DNA break, thereby resulting in a mutation proximal the target sequence in the DNA molecule. The site-directed endonuclease refers to the nuclease in polypeptide form. In some embodiments, the site-directed endonuclease is encoded by a nucleic acid molecule (e.g., mRNA). In some embodiments, the site-directed endonuclease is encoded by a recombinant expression vector (e.g., AAV).

[0521] Unless otherwise defined, all technical and scientific terms used herein have the same meaning as commonly understood by one of ordinary skill in the art to which this disclosure pertains. Preferred methods and materials are described below, although methods and materials similar or equivalent to those described herein can also be used in the practice or testing of the presently disclosed methods and compositions.

### EQUIVALENTS AND SCOPE

[0522] Those skilled in the art will recognize, or be able to ascertain using no more than routine experimentation, many equivalents to the specific embodiments, described herein. The scope of the present disclosure is not intended to be limited to the above Description, but rather is as set forth in the appended claims.

[0523] In the claims articles such as “a,” “an,” and “the” may mean one or more than one unless indicated to the contrary or otherwise evident from the context. Claims or descriptions that include “or” between one or more members of a group are considered satisfied if one, more than one, or all of the group members are present in, employed in, or otherwise relevant to a given product or process unless indicated to the contrary or otherwise evident from the context. The disclosure includes embodiments in which exactly one member of the group is present in, employed in, or otherwise relevant to a given product or process. The disclosure includes embodiments in which more than one, or all of the group members are present in, employed in, or otherwise relevant to a given product or process. Furthermore, it is to be understood that the disclosure encompasses all variations, combinations, and permutations in which one or more limitations, elements, clauses, descriptive terms, etc., from one or more of the listed claims is introduced into another claim. For example, any claim that is dependent on another claim can be modified to include one or more limitations found in any other claim that is dependent on the same base claim. Furthermore, where the claims recite a composition, it is to be understood that methods of using the composition for any of the purposes disclosed herein are included, and methods of making the composition according to any of the methods of making disclosed herein or other methods known in the art are included, unless otherwise indicated or unless it would be evident to one of ordinary skill in the art that a contradiction or inconsistency would arise.

[0524] Where elements are presented as lists, e.g., in Markush group format, it is to be understood that each subgroup of the elements is also disclosed, and any element(s) can be removed from the group. It should it be understood that, in general, where the invention, or aspects of the invention, is/are referred to as comprising particular elements, features, etc., certain embodiments of the invention or aspects of the invention consist, or consist essentially of, such elements, features, etc. For purposes of simplicity those embodiments have not been specifically set forth in haec verba herein.

[0525] It is also noted that the term “comprising” is intended to be open and permits but does not require the inclusion of additional elements or steps. When the term “comprising” is used herein, the term “consisting of” is thus also encompassed and disclosed

[0526] Where ranges are given, endpoints are included. Furthermore, it is to be understood that unless otherwise indicated or otherwise evident from the context and understanding of one of ordinary skill in the art, values that are expressed as ranges can assume any specific value or subrange within the stated ranges in different embodiments of the invention, to the tenth of the unit of the lower limit of the range, unless the context clearly dictates otherwise.

[0527] In addition, it is to be understood that any particular embodiment of the present invention that falls within the prior art may be explicitly excluded from any one or more of the claims. Since such embodiments are deemed to be known to one of ordinary skill in the art, they may be excluded even if the exclusion is not set forth explicitly herein. Any particular embodiment of the compositions of the invention (e.g., any nucleic acid or protein encoded thereby; any method of production; any method of use; etc.) can be excluded from any one or more claims, for any reason, whether or not related to the existence of prior art.

[0528] All cited sources, for example, references, publications, databases, database entries, and art cited herein, are incorporated into this application by reference, even if not expressly stated in the citation. In case of conflicting statements of a cited source and the instant application, the statement in the instant application shall control.

### EXAMPLES

### Example 1: In Silico Identification of gRNA Target Sequences in the FAAH Coding Sequence

[0529] To develop a CRISPR/Cas9 system targeting the FAAH coding sequence, the human FAAH gene was evaluated for candidate guide RNA (gRNA) target sequences. Specifically, an in silico algorithm based on the CCTop algorithm (see, e.g., Stemmer, M. et al (2015) PLoS ONE 10(4):e0124633) was used to identify gRNA target sequences immediately upstream a PAM for S. pyogenes Cas9 (SpCas9), S. lugdunensis Cas9 (SluCas9), or S. aureus Cas9 (SaCas9) in the FAAH coding sequence.

[0530] The region of the FAAH coding sequence evaluated for potential target sequences encompassed either exons 1-2 or exons 1-4, as introducing a mutation (e.g., frameshift mutation) in an exon proximal to the start codon was expected to increase the likelihood of a functional knock down (e.g., by inhibiting FAAH expression and/or producing a dysfunctional protein product). Chromosomal location of FAAH genomic regions are identified in Table 2.

TABLE 2
Chromosomal location of regions of FAAH

| Region of FAAH | Chromosome Location* |
|---|---|
| FAAH gene with regulatory elements | Chr1: 46,392,317-46,415,848 |
| FAAH 5′UTR | Chr1: 46,394,317-46,394,348 |
| FAAH coding sequence | Chr1: 46,394,349-46,413,575 |
| Exon 1 | Chr1: 46,394,317-46,394,543 |
| Exon 2 | Chr1: 46,402,091-46,402,204 |
| Exon 3 | Chr1: 46,405,014-46,405,148 |
| Exon 4 | Chr1: 46,405,372-46,405,505 |
| FAAH 3′UTR | Chr1: 46,413,576-46,413,845 |

*According to human reference genome Hg38

[0531] An approximately 4 kb region (i.e., 4193 bp for exon 1 and 4115 bp for exon2) from 2 kb upstream to 2 kb downstream of exon 1 and exon 2 of the FAAH coding sequence (i.e., exon 1 chr1:46,392,351-46,396,543; exon 2 chr1:46,400,090-46,404,204 of Hg38) was evaluated to identify gRNA target sequences for use with SpCas9, i.e., target sequences with the pattern N₂₀NGG (N=A,G,C,T; SEQ ID NO: 1282) using the CCTop algorithm (Stemmer et al, 2015 PLOS ONE 10:e0124633).

[0532] Likewise, the same region was evaluated to identify gRNA target sequences for use with SluCas9, i.e., target sequences with the pattern N₂₀NNGG (N=A,G,C,T; SEQ ID NO: 1283) using the CCTop algorithm.

[0533] The same region was evaluated to identify gRNA target sequences for use with SaCas9, i.e., target sequences with the pattern N₂₁NNGRRT (N=A,G,C,T; R=A,G; SEQ ID NO: 1284) using the CCTop algorithm.

[0534] The analysis identified approximately 1586 gRNA target sequences upstream SpCas9 PAM (NGG), approximately 1586 gRNA target sequences upstream SluCas9 PAM (NNGG), and approximately 241 gRNA target sequences upstream SaCas9 PAM (NNGRRT).

[0535] Subsequently, spacer sequences corresponding to the gRNA target sequences for SpCas9, SluCas9, and SaCas9 were filtered using the information on off-target sites generated by the CCTop algorithm. Specifically, spacers were filtered to remove any that had one or more perfect matches to a different target site in the human genome (Hg38). The spacers were also filtered based upon prediction of off-target sites with up to 4 mismatches in the human genome (Hg38). Spacers were removed that were predicted to have either (i) one or more off-target sites with one mismatch; or (ii) three or more off-target sites with two mismatches. Moreover, spacers were selected for target sequences having a minor allele frequency of less than or equal to 0.001 in the human population and an exonic or 5′ upstream sequence annotation in the human genome (see, e.g., Aken, et al (2016), The Enxembl gene annotation system, Database, Volume 2016, baw093). Finally, spacers were removed if the target sequence contained a homopolymer (i.e., consecutive sequence of five or more identical nucleotides, e.g., “AAAAA”, “CCCCC”, “GGGGG”, “TTTTT”). The spacer sequences for SpCas9 and SluCas9 gRNAs were further filtered to identify those with 100% homology to target sequences in the FAAH gene of cynomolgus monkey/macaque/Macaca fascicularis (i.e., suitable for use in pre-clinical studies in a non-human primate animal model).

[0536] Additionally, an approximately 200 bp region encompassing exon 4 (i.e., chr1: 46,405,341-46,405,540 of Hg38) was evaluated to identify gRNA target sequences for use with SaCas9, i.e., target sequences with the pattern N₂₁NNGRRT (N=A,G,C,T; R=A,G) using the CCTop algorithm. This analysis identified 9 additional target sequences upstream an SaCas9 PAM that reside within or adjacent the exon 4 coding region.

[0537] The analysis provided (i) 34 spacer sequences for SpCas9 (Table 3; target sequences identified by SEQ ID NOs: 1-34; spacer sequences identified by SEQ ID NOs: 35-68); (ii) 40 spacer sequences for SluCas9 (Table 4; target sequences identified by SEQ ID NOs: 69-108; spacer sequences identified by SEQ ID NOs: 109-148) The FAAH target sequence for SluCas9 gRNA spacers was extended to 22 nucleotides post-analysis; and (iii) 16 spacer sequences for SaCas9 gRNAs (Table 5; target sequences identified by SEQ ID NOs: 149-164; spacer sequences identified by SEQ ID NOs: 165-180).

[0538] Certain target sequence were identified that were located in FAAH intronic regions that were either upstream or downstream of FAAH exonic regions. These include SpCh1, SpCh2, SpCh3, SpCh4, SpCh5, SpCh6, SpCh22, and SpCh23 shown in Table 3; SluCh1, SluCh2, SluCh3, SluCh4, SluCh5, SluCh6, SluCh25, and SluCh26 shown in Table 4; and SpCh1, SaCh2, SaCh3, SaCh5, SaCh6, SaCh9, and SaCh16 shown in Table 5.

TABLE 3
Target Sequences for SpCas9 gRNAs in the FAAH Coding Sequence

| | | SEQ | | | SEQ |
|---|---|---|---|---|---|
| | Target Sequence | ID | Cut site | | ID |
| Name | PAM in bold underline | NO | Location* | Spacer Sequence | NO |
| SpCh1 | AAACCCGGACTGGATCAGCCGGG | 1 | 46394259 | AAACCCGGACUGGAUCAGCC | 35 |
| SpCh2 | AAAACCCGGACTGGATCAGCCGG | 2 | 46394260 | AAAACCCGGACUGGAUCAGC | 36 |
| SpCh3 | CTGATCCAGTCCGGGTTTTGCGG | 3 | 46394274 | CUGAUCCAGUCCGGGUUUUG | 37 |
| SpCh4 | ATCCAGTCCGGGTTTTGCGGCGG | 4 | 46394277 | AUCCAGUCCGGGUUUUGCGG | 38 |
| SpCh5 | CTCCGCCGCAAAACCCGGACTGG | 5 | 46394269 | CUCCGCCGCAAAACCCGGAC | 39 |
| SpCh6 | TCCGGGTTTTGCGGCGGAGCGGG | 6 | 46394283 | UCCGGGUUUUGCGGCGGAGC | 40 |
| SpCh7 | TGGCGCCTCCGGGGTCGCCCTGG | 7 | 46394397 | UGGCGCCUCCGGGGUCGCCC | 41 |
| SpCh8 | GCAGGCCAGGGCGACCCCGGAGG | 8 | 46394392 | GCAGGCCAGGGCGACCCCGG | 42 |
| SpCh9 | CGCCCTGGCCTGCTGCTTCGTGG | 9 | 46394412 | CGCCCUGGCCUGCUGCUUCG | 43 |
| SpCh10 | CGCCACGAAGCAGCAGGCCAGGG | 10 | 46394404 | CGCCACGAAGCAGCAGGCCA | 44 |
| SpCh11 | CCGCCACGAAGCAGCAGGCCAGG | 11 | 46394405 | CCGCCACGAAGCAGCAGGCC | 45 |
| SpCh12 | CCTGGCCTGCTGCTTCGTGGCGG | 12 | 46394415 | CCUGGCCUGCUGCUUCGUGG | 46 |
| SpCh13 | GGCCTGCTGCTTCGTGGCGGCGG | 13 | 46394418 | GGCCUGCUGCUUCGUGGCGG | 47 |
| SpCh14 | GGCCGCCGCCACGAAGCAGCAGG | 14 | 46394410 | GGCCGCCGCCACGAAGCAGC | 48 |
| SpCh15 | CTGCTTCGTGGCGGCGGCCGTGG | 15 | 46394424 | CUGCUUCGUGGCGGCGGCCG | 49 |
| SpCh16 | GCCGTGGCCCTGCGCTGGTCCGG | 16 | 46394440 | GCCGUGGCCCUGCGCUGGUC | 50 |
| SpCh17 | CCGTGGCCCTGCGCTGGTCCGGG | 17 | 46394441 | CCGUGGCCCUGCGCUGGUCC | 51 |
| SpCh18 | CCCGGACCAGCGCAGGGCCACGG | 18 | 46394431 | CCCGGACCAGCGCAGGGCCA | 52 |
| SpCh19 | CCGGCGCCCGGACCAGCGCAGGG | 19 | 46394437 | CCGGCGCCCGGACCAGCGCA | 53 |
| SpCh20 | CCCTGCGCTGGTCCGGGCGCCGG | 20 | 46394447 | CCCUGCGCUGGUCCGGGCGC | 54 |
| SpCh21 | GGCGCAGCGCTTCCGGCTCCAGG | 21 | 46394538 | GGCGCAGCGCUUCCGGCUCC | 55 |
| SpCh22 | GTCCAGGTCTGGGTTCTGTGGGG | 22 | 46402089 | GUCCAGGUCUGGGUUCUGUG | 56 |
| SpCh23 | AGTCCAGGTCTGGGTTCTGTGGG | 23 | 46402090 | AGUCCAGGUCUGGGUUCUGU | 57 |
| SpCh24 | GCGCCTCTGAGTCCAGGTCTGGG | 24 | 46402099 | GCGCCUCUGAGUCCAGGUCU | 58 |
| SpCh25 | AGCGCCTCTGAGTCCAGGTCTGG | 25 | 46402100 | AGCGCCUCUGAGUCCAGGUC | 59 |
| SpCh26 | CTAGCAGCGCCTCTGAGTCCAGG | 26 | 46402105 | CUAGCAGCGCCUCUGAGUCC | 60 |
| SpCh27 | CTTCTGCACCAGCTGAGGCAGGG | 27 | 46402134 | CUUCUGCACCAGCUGAGGCA | 61 |
| SpCh28 | TGTAACTTCTGCACCAGCTGAGG | 28 | 46402139 | UGUAACUUCUGCACCAGCUG | 62 |
| SpCh29 | GGTGAAGAGCACGGCCTCAGGGG | 29 | 46402176 | GGUGAAGAGCACGGCCUCAG | 63 |
| SpCh30 | GGCCGTGCTCTTCACCTATGTGG | 30 | 46402193 | GGCCGUGCUCUUCACCUAUG | 64 |
| SpCh31 | GCCGTGCTCTTCACCTATGTGGG | 31 | 46402194 | GCCGUGCUCUUCACCUAUGU | 65 |
| SpCh32 | TCCCACATAGGTGAAGAGCACGG | 32 | 46402185 | UCCCACAUAGGUGAAGAGCA | 66 |
| SpCh33 | GCTCTTCACCTATGTGGGAAAGG | 33 | 46402199 | GCUCUUCACCUAUGUGGGAA | 67 |
| SpCh34 | TGGCCTTACCTTTCCCACATAGG | 34 | 46402197 | UGGCCUUACCUUUCCCACAU | 68 |

*chromosomal location of guide cut-site in chromosome 1 of human genome Hg38

TABLE 4
Target Sequences for SluCas9 gRNAs in the FAAH Coding Sequence

| | | SEQ | | | SEQ |
|---|---|---|---|---|---|
| | Target Sequence | ID | Cut site | | ID |
| Name | PAM in bold underline | NO | Location* | Spacer Sequence | NO |
| SluChl | GCAAAACCCGGACTGGATCAGCCGGG | 69 | 46394260 | GCAAAACCCGGACUGGAUCAGC | 109 |
| SluCh2 | CGCAAAACCCGGACTGGATCAGCCGG | 70 | 46394261 | CGCAAAACCCGGACUGGAUCAG | 110 |
| SluCh3 | CGGCTGATCCAGTCCGGGTTTTGCGG | 71 | 46394273 | CGGCUGAUCCAGUCCGGGUUUU | 111 |
| SluCh4 | CTGATCCAGTCCGGGTTTTGCGGCGG | 72 | 46394276 | CUGAUCCAGUCCGGGUUUUGCG | 112 |
| SluCh5 | CCGCTCCGCCGCAAAACCCGGACTGG | 73 | 46394270 | CCGCUCCGCCGCAAAACCCGGA | 113 |
| SluCh6 | CAGTCCGGGTTTTGCGGCGGAGCGGG | 74 | 46394282 | CAGUCCGGGUUUUGCGGCGGAG | 114 |
| SluCh7 | GCCTGGCGCCTCCGGGGTCGCCCTGG | 75 | 46394396 | GCCUGGCGCCUCCGGGGUCGCC | 115 |
| SluCh8 | GCCAGGGCGACCCCGGAGGCGCCAGG | 76 | 46394386 | GCCAGGGCGACCCCGGAGGCGC | 116 |
| SluCh9 | GCAGCAGGCCAGGGCGACCCCGGAGG | 77 | 46394393 | GCAGCAGGCCAGGGCGACCCCG | 117 |
| SluCh10 | GAAGCAGCAGGCCAGGGCGACCCCGG | 78 | 46394396 | GAAGCAGCAGGCCAGGGCGACC | 118 |
| SluCh11 | GGTCGCCCTGGCCTGCTGCTTCGTGG | 79 | 46394411 | GGUCGCCCUGGCCUGCUGCUUC | 119 |
| SluCh12 | CGCCCTGGCCTGCTGCTTCGTGGCGG | 80 | 46394414 | CGCCCUGGCCUGCUGCUUCGUG | 120 |
| SluCh13 | CGCCGCCACGAAGCAGCAGGCCAGGG | 81 | 46394405 | CGCCGCCACGAAGCAGCAGGCC | 121 |
| SluCh14 | CCGCCGCCACGAAGCAGCAGGCCAGG | 82 | 46394406 | CCGCCGCCACGAAGCAGCAGGC | 122 |
| SluCh15 | CCTGGCCTGCTGCTTCGTGGCGGCGG | 83 | 46394417 | CCUGGCCUGCUGCUUCGUGGCG | 123 |
| SluCh16 | CACGGCCGCCGCCACGAAGCAGCAGG | 84 | 46394411 | CACGGCCGCCGCCACGAAGCAG | 124 |
| SluCh17 | CTGCTGCTTCGTGGCGGCGGCCGTGG | 85 | 46394423 | CUGCUGCUUCGUGGCGGCGGCC | 125 |
| SluCh18 | TGGCGGCGGCCGTGGCCCTGCGCTGG | 86 | 46394434 | UGGCGGCGGCCGUGGCCCUGCG | 126 |
| SluCh19 | GCGGCCGTGGCCCTGCGCTGGTCCGG | 87 | 46394439 | GCGGCCGUGGCCCUGCGCUGGU | 127 |
| SluCh20 | CGGCCGTGGCCCTGCGCTGGTCCGGG | 88 | 46394440 | CGGCCGUGGCCCUGCGCUGGUC | 128 |
| SluCh21 | GCGCCCGGACCAGCGCAGGGCCACGG | 89 | 46394432 | GCGCCCGGACCAGCGCAGGGCC | 129 |
| SluCh22 | TGGCCCTGCGCTGGTCCGGGCGCCGG | 90 | 46394446 | UGGCCCUGCGCUGGUCCGGGCG | 130 |
| SluCh23 | CCGCTCGCTGCCTCTGTCGCGCCCGG | 91 | 46394481 | CCGCUCGCUGCCUCUGUCGCGC | 131 |
| SluCh24 | GGCGGCGCAGCGCTTCCGGCTCCAGG | 92 | 46394537 | GGCGGCGCAGCGCUUCCGGCUC | 132 |
| SluCh23 | TGAGTCCAGGTCTGGGTTCTGTGGGG | 93 | 46402090 | UGAGUCCAGGUCUGGGUUCUGU | 133 |
| SluCh26 | CTGAGTCCAGGTCTGGGTTCTGTGGG | 94 | 46402091 | CUGAGUCCAGGUCUGGGUUCUG | 134 |
| SluCh27 | TCTGAGTCCAGGTCTGGGTTCTGTGG | 95 | 46402092 | UCUGAGUCCAGGUCUGGGUUCU | 135 |
| SluCh28 | ACAGAACCCAGACCTGGACTCAGAGG | 96 | 46402105 | ACAGAACCCAGACCUGGACUCA | 136 |
| SluCh29 | GCAGCGCCTCTGAGTCCAGGTCTGGG | 97 | 46402100 | GCAGCGCCUCUGAGUCCAGGUC | 137 |
| SluCh30 | AGCAGCGCCTCTGAGTCCAGGTCTGG | 98 | 46402101 | AGCAGCGCCUCUGAGUCCAGGU | 138 |
| SluCh31 | GGGCTAGCAGCGCCTCTGAGTCCAGG | 99 | 46402106 | GGGCUAGCAGCGCCUCUGAGUC | 139 |
| SluCh32 | AACTTCTGCACCAGCTGAGGCAGGGG | 100 | 46402134 | AACUUCUGCACCAGCUGAGGCA | 140 |
| SluCh33 | GTAACTTCTGCACCAGCTGAGGCAGG | 101 | 46402136 | GUAACUUCUGCACCAGCUGAGG | 141 |
| SluCh34 | CTGTGTAACTTCTGCACCAGCTGAGG | 102 | 46402140 | CUGUGUAACUUCUGCACCAGCU | 142 |
| SluCh33 | ATAGGTGAAGAGCACGGCCTCAGGGG | 103 | 46402177 | AUAGGUGAAGAGCACGGCCUCA | 143 |
| SluCh36 | ACATAGGTGAAGAGCACGGCCTCAGG | 104 | 46402179 | ACAUAGGUGAAGAGCACGGCCU | 144 |
| SluCh37 | TGAGGCCGTGCTCTTCACCTATGTGG | 105 | 46402192 | UGAGGCCGUGCUCUUCACCUAU | 145 |
| SluCh38 | GAGGCCGTGCTCTTCACCTATGTGGG | 106 | 46402193 | GAGGCCGUGCUCUUCACCUAUG | 146 |
| SluCh39 | CTTTCCCACATAGGTGAAGAGCACGG | 107 | 46402186 | CUUUCCCACAUAGGUGAAGAGC | 147 |
| SluCh40 | CGTGCTCTTCACCTATGTGGGAAAGG | 108 | 46402198 | CGUGCUCUUCACCUAUGUGGGA | 148 |

*chromosomal location of guide cut-site in chromosome 1 of human genome Hg38

TABLE 5
Target Sequences for SaCas9 gRNAs in the FAAH Coding Sequence

| | | SEQ | | | SEQ |
|---|---|---|---|---|---|
| | Target Sequence | ID | Cut site | | ID |
| Name | PAM in bold underline | NO | Location* | Spacer Sequence | NO |
| SaCh1 | TGGGATCCCGGCTGATCCAGTCCGGGT | 149 | 46394264 | UGGGAUCCCGGCUGAUCCAGU | 165 |
| SaCh2 | CAAAACCCGGACTGGATCAGCCGGGAT | 150 | 46394260 | CAAAACCCGGACUGGAUCAGC | 166 |
| SaCh3 | CGCTCCGCCGCAAAACCCGGACTGGAT | 151 | 46394270 | CGCUCCGCCGCAAAACCCGGA | 167 |
| SaCh4 | GGCCGCGCTGCCTGGCGCCTCCGGGGT | 152 | 46394386 | GGCCGCGCUGCCUGGCGCCUC | 168 |
| SaCh5 | CAGGTGACTGCCGGAGCGTAGTGGGAT | 153 | 46394558 | CAGGUGACUGCCGGAGCGUAG | 169 |
| SaCh6 | TGGGTTCTGTGGGGAACAAACTCGGAT | 154 | 46402079 | UGGGUUCUGUGGGGAACAAAC | 170 |
| SaCh7 | GCAGCGCCTCTGAGTCCAGGTCTGGGT | 155 | 46402101 | GCAGCGCCUCUGAGUCCAGGU | 171 |
| SaCh8 | GGGGCAGGGCTAGCAGCGCCTCTGAGT | 156 | 46402113 | GGGGCAGGGCUAGCAGCGCCU | 172 |
| SaCh9 | TGGAGTCCTGGCCCTGGGAGGAGGGAT | 157 | 46405367 | UGGAGUCCUGGCCCUGGGAGG | 173 |
| SaCh10 | GACTCCACGCTGGGCTTGAGCCTGAAT | 158 | 46405395 | GACUCCACGCUGGGCUUGAGC | 174 |
| SaCh11 | CATTCAGGCTCAAGCCCAGCGTGGAGT | 159 | 46405388 | CAUUCAGGCUCAAGCCCAGCG | 175 |
| SaCh12 | GCTGGGCTTGAGCCTGAATGAAGGGGT | 160 | 46405403 | GCUGGGCUUGAGCCUGAAUGA | 176 |
| SaCh13 | GCCTGAATGAAGGGGTGCCGGCGGAGT | 161 | 46405414 | GCCUGAAUGAAGGGGUGCCGG | 177 |
| SaCh14 | GTGGTGCATGTGCTGAAGCTGCAGGGT | 162 | 46405452 | GUGGUGCAUGUGCUGAAGCUG | 178 |
| SaCh15 | GTTCCACAGTCCATGTTCAGGTTGGGT | 163 | 46405503 | GUUCCACAGUCCAUGUUCAGG | 179 |
| SaCh16 | GTCCATGTTCAGGTTGGGTCTTGGGGT | 164 | 46405511 | GUCCAUGUUCAGGUUGGGUCU | 180 |

*chromosomal location of guide cut-site in chromosome 1 of human genome Hg38

### Example 2: Evaluation of In Vitro Gene Editing and Functional Activity of gRNA/SpCas9 Targeting the FAAH Coding Sequence

[0539] Analysis of editing using sgRNA/Cas9 was performed by measuring the frequency of small insertions and deletions (INDELs) induced in the FAAH coding sequence using complexes of SpCas9 sgRNA prepared with the spacers identified in Example 1 and SpCas9 polypeptide.

[0540] Specifically, SpCas9 sgRNA were prepared with the spacers identified in Table 3 (SpCh1-SpCh34; SEQ ID NOs: 35-68) inserted into the sgRNA backbone identified by SEQ ID NO: 1267 and shown in Table 6. The SpCas9 sgRNA sequences were chemically synthesized by a commercial vendor.

TABLE 6
Sequences of SpCas9 sgRNA

| | | SEQ |
|---|---|---|
| | | ID |
| Name | sgRNA Sequence (spacer in bold) | NO |
| Sp | mN*mN*mN*NNNNNNNNNNNNNNNNNGUUUU | 1267 |
| sgRNA | AGAGCUAGAAAUAGCAAGUUAAAAUAAGGCU | |
| | AGUCCGUUAUCAACUUGAAAAAGUGGCACCG | |
| | AGUCGGUmG*mC*mU* | |

mN*: 2′-O-methyl 3′phosphorothioate

[0541] The SpCas9 sgRNA were individually evaluated as complexes with SpCas9 protein for inducing INDELs at predicted cut sites in the FAAH coding sequence. Editing efficiency was measured in MCF7 cells. Briefly, 1×10⁵ MCF7 cells were suspended in SE solution (Lonza) and electroporated with 0.5 μg SpCas9 sgRNA and 0.5 μg SpCas9 protein (SEQ ID NO: 1268) using the 4D-nucleofector X unit (Lonza) CM-113 program. Following electroporation, the cells were incubated for 72 hours. Thereafter, genomic DNA was extracted and purified using a Quick DNA Kit (Zymo #D3011).

[0542] The frequency of INDELs induced at predicted cut sites in the genomic DNA was evaluated by TIDE analysis (see, e.g., Brinkman, et al (2014) NUCLEIC ACIDS RESEARCH 42:e168). Specifically, primers flanking the target site of each SpCas9 sgRNA were used in a PCR reaction with 2 μL (40-70 ng) of genomic DNA to amplify a region 1 of 955 bp and region 2 of 759 bp, flanking exon 1 and exon 2 respectively, surrounding the predicted cut site of each sgRNA. The primers used for amplification corresponding to each SpCas9 sgRNA are identified in Table 7. The PCR product was purified using AMPure XP PCR Purification (Beckman Coulter #A63881) and Sanger sequencing (Genewiz) was performed using the sequencing primers identified in Table 7. The sequence data was analyzed using Tsunami software to determine the frequency of INDELs at the predicted cut site for each sgRNA/SpCas9 complex.

[0543] The guides were categorized based on cleavage efficiency as measured by total frequency of INDELs introduced at the predicted cut site. As shown in Table 8, guides with low cleavage efficiency (total frequency of INDELs less than 15%), moderate cleavage efficiency (total frequency of INDELs 15-25%), and high cleavage efficiency (total frequency of INDELs greater than 25%) are indicated.

TABLE 7
TIDE Primer Sequences for Analysis of INDEL Frequency at
Cut Site Corresponding to SpCas9 sgRNAs

| | | SEQ | | SEQ | Sequencing | SEQ |
|---|---|---|---|---|---|---|
| sgRNA | PCR primer 1 | ID NO | PCR primer 2 | ID NO | primer | ID NO |
| SpCh1 | TCTAACAGCTGGCAT | 1291 | AAGCTCTCCAGATCC | 1325 | GGGCGCAGTCTTCAG | 1359 |
| | GTCTG | | CCTTG | | CATT | |
| SpCh2 | TCTAACAGCTGGCAT | 1292 | AAGCTCTCCAGATCC | 1326 | GGGCGCAGTCTTCAG | 1360 |
| | GTCTG | | CCTTG | | CATT | |
| SpCh3 | TCTAACAGCTGGCAT | 1293 | AAGCTCTCCAGATCC | 1327 | GGGCGCAGTCTTCAG | 1361 |
| | GTCTG | | CCTTG | | CATT | |
| SpCh4 | TCTAACAGCTGGCAT | 1294 | AAGCTCTCCAGATCC | 1328 | GGGCGCAGTCTTCAG | 1362 |
| | GTCTG | | CCTTG | | CATT | |
| SpCh5 | TCTAACAGCTGGCAT | 1295 | AAGCTCTCCAGATCC | 1329 | GGGCGCAGTCTTCAG | 1363 |
| | GTCTG | | CCTTG | | CATT | |
| SpCh6 | TCTAACAGCTGGCAT | 1296 | AAGCTCTCCAGATCC | 1330 | GGGCGCAGTCTTCAG | 1364 |
| | GTCTG | | CCTTG | | CATT | |
| SpCh7 | TCTAACAGCTGGCAT | 1297 | AAGCTCTCCAGATCC | 1331 | GGGCGCAGTCTTCAG | 1365 |
| | GTCTG | | CCTTG | | CATT | |
| SpCh8 | TCTAACAGCTGGCAT | 1298 | AAGCTCTCCAGATCC | 1332 | GGGCGCAGTCTTCAG | 1366 |
| | GTCTG | | CCTTG | | CATT | |
| SpCh9 | TCTAACAGCTGGCAT | 1299 | AAGCTCTCCAGATCC | 1333 | GGGCGCAGTCTTCAG | 1367 |
| | GTCTG | | CCTTG | | CATT | |
| SpCh10 | TCTAACAGCTGGCAT | 1300 | AAGCTCTCCAGATCC | 1334 | GGGCGCAGTCTTCAG | 1368 |
| | GTCTG | | CCTTG | | CATT | |
| SpCh11 | TCTAACAGCTGGCAT | 1301 | AAGCTCTCCAGATCC | 1335 | GTCCTCAACCCCTGG | 1369 |
| | GTCTG | | CCTTG | | CATCC | |
| SpCh12 | TCTAACAGCTGGCAT | 1302 | AAGCTCTCCAGATCC | 1336 | GTCCTCAACCCCTGG | 1370 |
| | GTCTG | | CCTTG | | CATCC | |
| SpCh13 | TCTAACAGCTGGCAT | 1303 | AAGCTCTCCAGATCC | 1337 | GTCCTCAACCCCTGG | 1371 |
| | GTCTG | | CCTTG | | CATCC | |
| SpCh14 | TCTAACAGCTGGCAT | 1304 | AAGCTCTCCAGATCC | 1338 | GTCCTCAACCCCTGG | 1372 |
| | GTCTG | | CCTTG | | CATCC | |
| SpCh15 | TCTAACAGCTGGCAT | 1305 | AAGCTCTCCAGATCC | 1339 | GTCCTCAACCCCTGG | 1373 |
| | GTCTG | | CCTTG | | CATCC | |
| SpCh16 | TCTAACAGCTGGCAT | 1306 | AAGCTCTCCAGATCC | 1340 | GTCCTCAACCCCTGG | 1374 |
| | GTCTG | | CCTTG | | CATCC | |
| SpCh17 | TCTAACAGCTGGCAT | 1307 | AAGCTCTCCAGATCC | 1341 | GTCCTCAACCCCTGG | 1375 |
| | GTCTG | | CCTTG | | CATCC | |
| SpCh18 | TCTAACAGCTGGCAT | 1308 | AAGCTCTCCAGATCC | 1342 | GTCCTCAACCCCTGG | 1376 |
| | GTCTG | | CCTTG | | CATCC | |
| SpCh19 | TCTAACAGCTGGCAT | 1309 | AAGCTCTCCAGATCC | 1343 | GTCCTCAACCCCTGG | 1377 |
| | GTCTG | | CCTTG | | CATCC | |
| SpCh20 | TCTAACAGCTGGCAT | 1310 | AAGCTCTCCAGATCC | 1344 | GTCCTCAACCCCTGG | 1378 |
| | GTCTG | | CCTTG | | CATCC | |
| SpCh21 | TCTAACAGCTGGCAT | 1311 | AAGCTCTCCAGATCC | 1345 | GTCCTCAACCCCTGG | 1379 |
| | GTCTG | | CCTTG | | CATCC | |
| SpCh22 | CATCAGTCTGGAGCT | 1312 | AGACCAGACTTGTTG | 1346 | AGCATGTGCCTGTAG | 1380 |
| | AGGCA | | CCCAA | | TTC | |
| SpCh23 | CATCAGTCTGGAGCT | 1313 | AGACCAGACTTGTTG | 1347 | AGCATGTGCCTGTAG | 1381 |
| | AGGCA | | CCCAA | | TTC | |
| SpCh24 | CATCAGTCTGGAGCT | 1314 | AGACCAGACTTGTTG | 1348 | AGCATGTGCCTGTAG | 1382 |
| | AGGCA | | CCCAA | | TTC | |
| SpCh25 | CATCAGTCTGGAGCT | 1315 | AGACCAGACTTGTTG | 1349 | AGCATGTGCCTGTAG | 1383 |
| | AGGCA | | CCCAA | | TTC | |
| SpCh26 | CATCAGTCTGGAGCT | 1316 | AGACCAGACTTGTTG | 1350 | AGCATGTGCCTGTAG | 1384 |
| | AGGCA | | CCCAA | | TTC | |
| SpCh27 | CATCAGTCTGGAGCT | 1317 | AGACCAGACTTGTTG | 1351 | AGCATGTGCCTGTAG | 1385 |
| | AGGCA | | CCCAA | | TTC | |
| SpCh28 | CATCAGTCTGGAGCT | 1318 | AGACCAGACTTGTTG | 1352 | AGCATGTGCCTGTAG | 1386 |
| | AGGCA | | CCCAA | | TTC | |
| SpCh29 | CATCAGTCTGGAGCT | 1319 | AGACCAGACTTGTTG | 1353 | AGCATGTGCCTGTAG | 1387 |
| | AGGCA | | CCCAA | | TTC | |
| SpCh30 | CATCAGTCTGGAGCT | 1320 | AGACCAGACTTGTTG | 1354 | AGCATGTGCCTGTAG | 1388 |
| | AGGCA | | CCCAA | | TTC | |
| SpCh31 | CATCAGTCTGGAGCT | 1321 | AGACCAGACTTGTTG | 1355 | AGCATGTGCCTGTAG | 1389 |
| | AGGCA | | CCCAA | | TTC | |
| SpCh32 | CATCAGTCTGGAGCT | 1322 | AGACCAGACTTGTTG | 1356 | AGCATGTGCCTGTAG | 1390 |
| | AGGCA | | CCCAA | | TTC | |
| SpCh33 | CATCAGTCTGGAGCT | 1323 | AGACCAGACTTGTTG | 1357 | AGCATGTGCCTGTAG | 1391 |
| | AGGCA | | CCCAA | | TTC | |
| SpCh34 | CATCAGTCTGGAGCT | 1324 | AGACCAGACTTGTTG | 1358 | AGCATGTGCCTGTAG | 1392 |
| | AGGCA | | CCCAA | | TTC | |

TABLE 8
SpCas9 sgRNAs Categorized Based on Cleavage Efficiency

| Total | |
|---|---|
| INDEL % | Guides |
| <15% | SpCh1, SpCh2, SpCh15 |
| 15%-25% | SpCh4, SpCh5, SpCh7, SpCh14, SpCh20 |
| >25% | SpCh3, SpCh6, SpCh8, SpCh9, SpCh10, SpCh11, SpCh12, |
| | SpCh13, SpCh16, SpCh17, SpCh18, SpCh19, SpCh21, |
| | SpCh22, SpCh23, SpCh24, SpCh25, SpCh26, SpCh27, |
| | SpCh28, SpCh29, SpCh30, SpCh31, SpCh32, SpCh33, |
| | SpCh34 |

[0544] A subset of SpCas9 sgRNAs were selected for subsequent evaluation, including measurement of INDEL frequency at the predicted cut site, measurement of FAAH mRNA levels, and measurement of FAAH polypeptide levels in cells edited the sgRNA/SpCas9 complex. This subset included the sgRNAs that are identified in Table 9, which includes SpCh8, SpCh9, SpCh26, SpCh29, SpCh30, SpCh31, SpCh32, and SpCh34 having cut locations within FAAH exon 1 or exon 2, and SpCh22 and SpCh23 having cut locations outside of FAAH exon 1 or exon 2.

[0545] Briefly, 3×10⁵ MCF7 cells were electroporated with 1.5 μg SpCas9 sgRNA and 1.5 μg SpCas9 protein as described above. The cells were harvested and extracted for genomic DNA for INDEL quantification by TIDE analysis as described above. The overall INDEL frequency at the predicted cut site of each sgRNA is provided in Table 9. The INDELs resulting in an in-frame mutation (i.e., ±3 nt, ±6 nt, ±9 nt, etc.) were removed to provide the percentage of INDELs expected to produce a frameshift mutation (i.e., ±1 nt, ±2 nt, ±4 nt, etc), is also shown in Table 9. The sgRNA were ranked according to frequency of INDELs that cause a frameshift mutation, as shown in FIG. 1A. The sgRNAs having cut sites outside the exon 1 or exon 2 regions of FAAH are shown by asterisk. As a frameshift mutation for these guides is not applicable, the value represented by “frameshift INDELs” refers to the frequency of total INDELs minus the frequency of INDELs that are divisible by 3 (e.g., ±3 nt, ±6 nt, ±9 nt, etc).

[0546] The overall frequency of INDELs exceeding 90% for each sgRNA evaluated. Additionally, most sgRNAs with cut locations within FAAH exons resulted in a frequency INDELs introducing a frameshift mutation that exceeded 80%. The SpCh30 sgRNA induced the highest frequency of INDELs of the SpCas9 sgRNAs cutting within a FAAH exon (98.1% total, 95% introducing a frameshift mutation).

[0547] Edited MCF7 cells were also harvested for RNA extraction to determine FAAH mRNA levels using a quantitative PCR (qPCR) assay. Specifically, RNA extraction was performed using a Quick-RNA 96 Kit (Zymo Research, #R1052). RNA concentration was measured by DropSense (Trinean) and 250 ng RNA was used for reverse transcription using a QuantiTect Reverse Transcription kit (Qiagen #205311) to prepare cDNA. Subsequently, 40 ng of cDNA was used for qPCR to measure FAAH mRNA levels. For qPCR quantification, TaqMan Gene Expression Master Mix (ThermoFisher #4369016) was combined with the reagents below. TBP mRNA levels were used as qPCR internal controls.

| | Forward primer: |
|---|---|
| (SEQ ID NO: 1273) | |
| | TGATATCGGAGGCAGCATCC; |
| | Reverse primer: |
| (SEQ ID NO: 1274) | |
| | CTTCAGGCCACTCTTGCTGA; |
| | and |
| | Probe: |
| (SEQ ID NO: 1275) | |
| | CTTCCCCTCCTCCTTCTGC. |

[0548] FAAH mRNA levels were quantified as a fold change between an edited sample and an untreated control sample subjected to electroporation without CRISPR/Cas9 components. Fold change was calculated using the 2\hat{ }(−ddCt) method and is provided for each sgRNA in Table 9. The sgRNA were further ranked by FAAH mRNA level following editing, as shown in FIG. 1B. Most sgRNA achieved at least a 50% reduction in FAAH mRNA levels, with SpCh31 sgRNA producing the greatest reduction.

[0549] Edited MCF7 cells were also harvested for total protein extraction to quantify FAAH protein levels by Simple Wes. Protein extraction was performed using RIPA lysis and extraction buffer (ThermoFisher #89900). Subsequently, 1-3 μg of protein was loaded onto Simple Wes and analyzed using a mouse anti-FAAH1 antibody (Abcam #ab54615; 1:25 dilution) and an anti-mouse secondary antibody (Abcam #ab97040) for detection of FAAH protein and a rabbit anti-GAPDH mAb 14C10 (CST #2118S; 1:25 dilution) in antibody diluent (ProteinSimple) with NIR anti-rabbit secondary antibody (ProteinSimple #043-819) for detection of GAPDH as an internal control protein.

[0550] The relative expression level of FAAH protein was compared to GAPDH as internal control. The relative expression level of FAAH protein was then normalized for samples treated with sgRNA/SpCas9 to a PBS control sample that was not subjected to electroporation. Normalized FAAH protein levels following editing are provided in Table 9. The sgRNA were further ranked based on the FAAH protein level, as shown in FIG. 1C. Several of the sgRNAs evaluated, including SpCh9, SpCh23, SpCh32, SpCh8, SpCh22, and SpCh26, resulted in a reduction of FAAH protein expression of 30% or more. Notably, sgRNAs with cut sites outside exon 1 or 2 (e.g., SpCh22 and SpCh23) resulted in a substantial reduction in FAAH mRNA and protein levels.

TABLE 9
Quantification of Editing Efficiency and Functional Activity
of SpCas9 sgRNAs Targeting FAAH Coding Sequence

| sgRNA | Indel (%) | | FAAH mRNA | FAAH protein |
|---|---|---|---|---|
| Name | Total | Frameshift* | (fold change) | (FAAH:GAPDH) |
| SpCh22 | 99.6 | 98.6 | 0.870335 | 0.645349 |
| SpCh30 | 98.1 | 95 | 0.593378 | 0.7750086 |
| SpCh32 | 98.6 | 94 | 0.287005 | 0.598545394 |
| SpCh9 | 96.3 | 93.2 | 0.3941 | 0.584547936 |
| SpCh29 | 99.4 | 91.8 | 0.33686 | 0.835150453 |
| SpCh34 | 95.5 | 91.7 | 0.43471 | 0.983583045 |
| SpCh31 | 97.1 | 91 | 0.263267 | 1.10133581 |
| SpCh23 | 96.1 | 81.3 | 0.61771 | 0.5913049 |
| SpCh8 | 93.5 | 81.1 | 0.351606 | 0.603549182 |
| SpCh26 | 93.4 | 63.8 | 0.723949 | 0.667934285 |

*Frameshift INDEL % refers to INDELs expected to result in a frameshift mutation in the FAAH coding sequence (i.e., ±1 nt, ±2 nt, ±4 nt). The sgRNAs with values in underline have cut sites outside exon 1 or exon 2 of FAAH, wherein frameshift mutations are not applicable. Thus, Frameshift INDEL % refers to frequency of total INDELs minus frequency of INDELs that are ±3 nt, ±6 nt, ±9 nt, etc.

### Example 3: Evaluation of In Vitro Gene Editing and Functional Activity of gRNA/SluCas9 Targeting the FAAH Coding Sequence

[0551] Frequency of INDELs induced at predicted cut sites in the FAAH coding sequence was also evaluated following in vitro treatment with complexes of SluCas9 protein and sgRNA that were prepared with spacers identified in Example 1.

[0552] Specifically, SluCas9 sgRNA were prepared with the spacers identified in Table 4 (SluCh1-SluCh40; SEQ ID NOs: 109-148) inserted into a sgRNA backbone identified by SEQ ID NO: 1269 and shown in Table 10. The SluCas9 sgRNA sequences were chemically synthesized by a commercial vendor.

TABLE 10
Sequence of SluCas9 sgRNA

| | | SEQ |
|---|---|---|
| | sgRNA Sequence | ID |
| Name | (spacer in bold) | NO |
| SluCas9 | mN*mN*mN*NNNNNNNNNNNNNNNNNNN | 1269 |
| sgRNA | GUUUUAGUACUCUGGAAACAGAAUCUAC | |
| | UGAAACAAGACAAUAUGUCGUGUUUAUC | |
| | CCAUCAAUUUAUUGGUGGmG*mA*mU* | |

mN*: 2′-O-methyl 3′phosphorothioate

[0553] The SluCas9 sgRNA were individually evaluated as complexes with SluCas9 protein for inducing INDELs at predicted cut sites in the FAAH coding sequence. Editing efficiency was measured in MCF7 cells. Briefly, 1×10⁵ MCF7 cells were electroporated with 0.5 μg sgRNA and 0.4 μg SluCas9 protein (SEQ ID NO: 1270) and incubated for 72 hours. Cells were harvested for genomic DNA extraction, followed by TIDE analysis as described in Example 2. TIDE PCR and sequencing primers corresponding to each SluCas9 sgRNA are identified in Table 11.

[0554] The guides were categorized based on cleavage efficiency as measured by total frequency of INDELs introduced at the predicted cut site. As shown in Table 12, guides with low cleavage efficiency (total frequency of INDELs less than 15%), moderate cleavage efficiency (total frequency of INDELs 15-25%), and high cleavage efficiency (total frequency of INDELs greater than 25%) are indicated.

TABLE II
TIDE Primer Sequences for Analysis of INDEL Frequency
at Cut Site Corresponding to SluCas9 sgRNAs

| | | SEQ | | SEQ | | SEQ |
|---|---|---|---|---|---|---|
| | | ID | | ID | Sequencing | ID |
| sgRNA | PCR primer 1 | NO | PCR primer 2 | NO | primer | NO |
| SluCh1 | TCTAACAGCTGGC | 1393 | AAGCTCTCCAGAT | 1433 | GGGCGCAGTCTTC | 1473 |
| | ATGTCTG | | CCCCTTG | | AGCATT | |
| SluCh2 | TCTAACAGCTGGC | 1394 | AAGCTCTCCAGAT | 1434 | GGGCGCAGTCTTC | 1474 |
| | ATGTCTG | | CCCCTTG | | AGCATT | |
| SluCh3 | TCTAACAGCTGGC | 1395 | AAGCTCTCCAGAT | 1435 | GGGCGCAGTCTTC | 1475 |
| | ATGTCTG | | CCCCTTG | | AGCATT | |
| SluCh4 | TCTAACAGCTGGC | 1396 | AAGCTCTCCAGAT | 1436 | GGGCGCAGTCTTC | 1476 |
| | ATGTCTG | | CCCCTTG | | AGCATT | |
| SluCh5 | TCTAACAGCTGGC | 1397 | AAGCTCTCCAGAT | 1437 | GGGCGCAGTCTTC | 1477 |
| | ATGTCTG | | CCCCTTG | | AGCATT | |
| SluCh6 | TCTAACAGCTGGC | 1398 | AAGCTCTCCAGAT | 1438 | GGGCGCAGTCTTC | 1478 |
| | ATGTCTG | | CCCCTTG | | AGCATT | |
| SluCh7 | TCTAACAGCTGGC | 1399 | AAGCTCTCCAGAT | 1439 | GGGCGCAGTCTTC | 1479 |
| | ATGTCTG | | CCCCTTG | | AGCATT | |
| SluCh8 | TCTAACAGCTGGC | 1400 | AAGCTCTCCAGAT | 1440 | GGGCGCAGTCTTC | 1480 |
| | ATGTCTG | | CCCCTTG | | AGCATT | |
| SluCh9 | TCTAACAGCTGGC | 1401 | AAGCTCTCCAGAT | 1441 | GGGCGCAGTCTTC | 1481 |
| | ATGTCTG | | CCCCTTG | | AGCATT | |
| SluCh10 | TCTAACAGCTGGC | 1402 | AAGCTCTCCAGAT | 1442 | GGGCGCAGTCTTC | 1482 |
| | ATGTCTG | | CCCCTTG | | AGCATT | |
| SluCh11 | TCTAACAGCTGGC | 1403 | AAGCTCTCCAGAT | 1443 | GTCCTCAACCCCT | 1483 |
| | ATGTCTG | | CCCCTTG | | GGCATCC | |
| SluCh12 | TCTAACAGCTGGC | 1404 | AAGCTCTCCAGAT | 1444 | GTCCTCAACCCCT | 1484 |
| | ATGTCTG | | CCCCTTG | | GGCATCC | |
| SluCh13 | TCTAACAGCTGGC | 1405 | AAGCTCTCCAGAT | 1445 | GTCCTCAACCCCT | 1485 |
| | ATGTCTG | | CCCCTTG | | GGCATCC | |
| SluCh14 | TCTAACAGCTGGC | 1406 | AAGCTCTCCAGAT | 1446 | GTCCTCAACCCCT | 1486 |
| | ATGTCTG | | CCCCTTG | | GGCATCC | |
| SluCh15 | TCTAACAGCTGGC | 1407 | AAGCTCTCCAGAT | 1447 | GTCCTCAACCCCT | 1487 |
| | ATGTCTG | | CCCCTTG | | GGCATCC | |
| SluCh16 | TCTAACAGCTGGC | 1408 | AAGCTCTCCAGAT | 1448 | GTCCTCAACCCCT | 1488 |
| | ATGTCTG | | CCCCTTG | | GGCATCC | |
| SluCh17 | TCTAACAGCTGGC | 1409 | AAGCTCTCCAGAT | 1449 | GTCCTCAACCCCT | 1489 |
| | ATGTCTG | | CCCCTTG | | GGCATCC | |
| SluCh18 | TCTAACAGCTGGC | 1410 | AAGCTCTCCAGAT | 1450 | GTCCTCAACCCCT | 1490 |
| | ATGTCTG | | CCCCTTG | | GGCATCC | |
| SluCh19 | TCTAACAGCTGGC | 1411 | AAGCTCTCCAGAT | 1451 | GTCCTCAACCCCT | 1491 |
| | ATGTCTG | | CCCCTTG | | GGCATCC | |
| SluCh20 | TCTAACAGCTGGC | 1412 | AAGCTCTCCAGAT | 1452 | GTCCTCAACCCCT | 1492 |
| | ATGTCTG | | CCCCTTG | | GGCATCC | |
| SluCh21 | TCTAACAGCTGGC | 1413 | AAGCTCTCCAGAT | 1453 | GTCCTCAACCCCT | 1493 |
| | ATGTCTG | | CCCCTTG | | GGCATCC | |
| SluCh22 | TCTAACAGCTGGC | 1414 | AAGCTCTCCAGAT | 1454 | GTCCTCAACCCCT | 1494 |
| | ATGTCTG | | CCCCTTG | | GGCATCC | |
| SluCh23 | TCTAACAGCTGGC | 1415 | AAGCTCTCCAGAT | 1455 | GTCCTCAACCCCT | 1495 |
| | ATGTCTG | | CCCCTTG | | GGCATCC | |
| SluCh24 | TCTAACAGCTGGC | 1416 | AAGCTCTCCAGAT | 1456 | GTCCTCAACCCCT | 1496 |
| | ATGTCTG | | CCCCTTG | | GGCATCC | |
| SluCh25 | CATCAGTCTGGAG | 1417 | AGACCAGACTTGT | 1457 | AGCATGTGCCTGT | 1497 |
| | CTAGGCA | | TGCCCAA | | AGTTC | |
| SluCh26 | CATCAGTCTGGAG | 1418 | AGACCAGACTTGT | 1458 | AGCATGTGCCTGT | 1498 |
| | CTAGGCA | | TGCCCAA | | AGTTC | |
| SluCh27 | CATCAGTCTGGAG | 1419 | AGACCAGACTTGT | 1459 | AGCATGTGCCTGT | 1499 |
| | CTAGGCA | | TGCCCAA | | AGTTC | |
| SluCh28 | CATCAGTCTGGAG | 1420 | AGACCAGACTTGT | 1460 | AGCATGTGCCTGT | 1500 |
| | CTAGGCA | | TGCCCAA | | AGTTC | |
| SluCh29 | CATCAGTCTGGAG | 1421 | AGACCAGACTTGT | 1461 | AGCATGTGCCTGT | 1501 |
| | CTAGGCA | | TGCCCAA | | AGTTC | |
| SluCh30 | CATCAGTCTGGAG | 1422 | AGACCAGACTTGT | 1462 | AGCATGTGCCTGT | 1502 |
| | CTAGGCA | | TGCCCAA | | AGTTC | |
| SluCh31 | CATCAGTCTGGAG | 1423 | AGACCAGACTTGT | 1463 | AGCATGTGCCTGT | 1503 |
| | CTAGGCA | | TGCCCAA | | AGTTC | |
| SluCh32 | CATCAGTCTGGAG | 1424 | AGACCAGACTTGT | 1464 | AGCATGTGCCTGT | 1504 |
| | CTAGGCA | | TGCCCAA | | AGTTC | |
| SluCh33 | CATCAGTCTGGAG | 1425 | AGACCAGACTTGT | 1465 | AGCATGTGCCTGT | 1505 |
| | CTAGGCA | | TGCCCAA | | AGTTC | |
| SluCh34 | CATCAGTCTGGAG | 1426 | AGACCAGACTTGT | 1466 | AGCATGTGCCTGT | 1506 |
| | CTAGGCA | | TGCCCAA | | AGTTC | |
| SluCh35 | CATCAGTCTGGAG | 1427 | AGACCAGACTTGT | 1467 | AGCATGTGCCTGT | 1507 |
| | CTAGGCA | | TGCCCAA | | AGTTC | |
| SluCh36 | CATCAGTCTGGAG | 1428 | AGACCAGACTTGT | 1468 | AGCATGTGCCTGT | 1508 |
| | CTAGGCA | | TGCCCAA | | AGTTC | |
| SluCh37 | CATCAGTCTGGAG | 1429 | AGACCAGACTTGT | 1469 | AGCATGTGCCTGT | 1509 |
| | CTAGGCA | | TGCCCAA | | AGTTC | |
| SluCh38 | CATCAGTCTGGAG | 1430 | AGACCAGACTTGT | 1470 | AGCATGTGCCTGT | 1510 |
| | CTAGGCA | | TGCCCAA | | AGTTC | |
| SluCh39 | CATCAGTCTGGAG | 1431 | AGACCAGACTTGT | 1471 | AGCATGTGCCTGT | 1511 |
| | CTAGGCA | | TGCCCAA | | AGTTC | |
| SluCh40 | CATCAGTCTGGAG | 1432 | AGACCAGACTTGT | 1472 | AGCATGTGCCTGT | 1512 |
| | CTAGGCA | | TGCCCAA | | AGTTC | |

TABLE 12
SluCas9 sgRNAs Categorized Based on Cleavage Efficiency

| Total INDEL % | Guides |
|---|---|
| <15% | SluCh3, SluCh5, SluCh6, SluCh7, SluCh12, SluCh13, SluCh14, SluCh15, |
| | SluCh16, SluCh17, SluCh18, SluCh19, SluCh23, SluCh26, SluCh29, |
| | SluCh30, SluCh31, SluCh33, SluCh37, SluCh38, SluCh40 |
| 15%-25% | SluCh1, SluCh2, SluCh10, SluCh21, SluCh22, SluCh24, SluCh34 |
| >25% | SluCh4, SluCh8, SluCh9, SluCh11, SluCh20, SluCh25, SluCh27, SluCh28, |
| | SluCh32, SluCh35, SluCh36, SluCh39 |

[0555] A subset of the SluCas9 sgRNAs were selected for subsequent evaluation, including measurement of INDEL frequency, FAAH mRNA levels, and FAAH protein levels in edited cells. The sgRNA evaluated are identified in Table 13, which includes SluCh8, SluCh9, SluCh11, SluCh20, SluCh27, SluCh28, SluCh32, and SluCh39 having cut locations within exon 1 or 2 of FAAH, and SluCh4 and SluCh25 having cut locations outside exon 1 or 2 of FAAH. Briefly, 3×10⁵ MCF7 cells were electroporated with 1.5 μg sgRNA and 1 μg SluCas9 protein, incubated for 72 hours. Cells were harvested for extraction of genomic DNA for use in INDEL quantification by TIDE analysis, for extraction of RNA for quantification of FAAH mRNA by qPCR, and for extraction of protein for quantification of FAAH protein by Simple Wes, each as described in Example 2.

[0556] Quantification of overall INDEL frequency, as well as frequency of INDELs resulting in a frameshift mutation, is identified in Table 13. As shown in FIG. 2A, the sgRNA are further ranked based on frequency of INDELs expected to result in a frameshift mutation. The top sgRNAs that cut within an exon (SluCh11, SluCh27, and SluCh39) resulting in a frequency of INDELs resulting in a frameshift mutation that exceeded 50%.

[0557] Also provided in Table 13 are FAAH mRNA levels as measured by qPCR, provided as fold-change in cells electroporated with SluCas9/sgRNA complexes compared to control cells electroporated in PBS only. As shown in FIG. 2B, the sgRNA are further ranked based upon reduction of FAAH mRNA expression levels, with most of the sgRNAs resulting in a 60% or higher reduction in mRNA expression level.

[0558] The expression level of FAAH protein measured by Simple Wes was normalized to expression level of the internal control protein GAPDH. The relative expression level of FAAH protein was then normalized for edited samples relative to a PBS control sample that was not subjected to electroporation (see Table 13). As shown in FIG. 2C, the sgRNA are further ranked based upon reduction of FAAH protein levels, with the top four sgRNAs reducing FAAH protein levels by approximately 40%.

TABLE 13
Quantification of Editing Efficiency and Functional Activity
of SluCas9 sgRNAs Targeting FAAH Coding Sequence

| | Indel (%) | | FAAH mRNA (fold | FAAH protein |
|---|---|---|---|---|
| sgRNA ID | Total | Frameshift* | change) | (FAAH:GAPDH) |
| SluCh11 | 98.2 | 94.5 | 0.307527 | 0.857667575 |
| SluCh27 | 92.1 | 84.4 | 0.242103 | 0.745333219 |
| SluCh25 | 89.2 | 63.1 | 0.253054 | 0.553892166 |
| SluCh39 | 80.7 | 54.2 | 0.316017 | 1.01355642 |
| SluCh4 | 59.5 | 45.8 | 0.336368 | 0.838423787 |
| SluCh9 | 58.4 | 44.3 | 0.27299 | 0.571584882 |
| SluCh32 | 85.9 | 41 | 0.40806 | 0.782063469 |
| SluCh8 | 53.6 | 39.5 | 0.25047 | 0.587178518 |
| SluCh28 | 75.6 | 36.7 | 0.328629 | 0.622313139 |
| SluCh20 | 33.7 | 24.3 | 0.564625 | 0.980897116 |

*Frameshift INDEL % refers to INDELs expected to result in a frameshift mutation in the FAAH coding sequence (i.e., ±1 nt, ±2 nt, ±4 nt). The sgRNAs with values in underline have cut sites outside exon 1 or exon 2 of FAAH, wherein frameshift mutations are not applicable. Thus, Frameshift INDEL% refers to frequency of total INDELs minus frequency of INDELs that are a multiple of 3 (e.g., ±3 nt, ±6 nt, ±9 nt, etc.)

### Example 4: Evaluation of In Vitro Gene Editing and Functional Activity of gRNA/SaCas9 Targeting the FAAH Coding Sequence

[0559] Frequency of INDELs induced at predicted cut sites in the FAAH coding sequences was determined following in vitro treatment with SaCas9 protein and sgRNA prepared with spacers identified in Example 1.

[0560] Specifically, SaCas9 sgRNA were prepared with the spacers identified in Table 5 (SaCh1-SaCh16; SEQ ID NOs: 165-180) inserted into the sgRNA backbone identified by SEQ ID NO: 1271. Sequence of the SaCas9 sgRNA backbone is identified in Table 14. The SaCas9 sgRNA sequences were chemically synthesized by a commercial vendor.

TABLE 14
Sequences of SaCas9 sgRNA Targeting
FAAH Coding Sequence

| | | SEQ |
|---|---|---|
| | sgRNA Sequence | ID |
| Name | (Spacer in Bold) | NO |
| SaCh1 | mN*mN*mN*NNNNNNNNNNNNNNNNNNG | 1271 |
| sgRNA | UUUUAGUACUCUGGAAACAGAAUCUACU | |
| | AAAACAAGGCAAAAUGCCGUGUUUAUCU | |
| | CGUCAACUUGUUGGCGAmG*mA*mU* | |

mN*: 2′-O-methyl 3′phosphorothioate

[0561] The sgRNA were individually evaluated as complexes with SaCas9 protein for inducing INDELs at predicted cut sites in the FAAH coding sequence and for expression of FAAH mRNA. Briefly, 1×10⁵ MCF7 cells were electroporated with 3 μg sgRNA and 3 μg SaCas9 protein (SEQ ID NO: 1272) and incubated for 72 hours. The cells were then harvested for INDEL quantification by TIDE analysis or for FAAH mRNA expression by qPCR as described in Example 2.

[0562] For INDEL quantification, genomic DNA was extracted and 1 μL (30-50 ng) of genomic DNA was used for PCR amplification of regions containing predicted cut sites. The purified PCR products were then sequenced using Sanger sequencing, and cutting efficiency was analyzed by Tsunami. The PCR and sequencing primers corresponding to each sgRNA are identified in Table 15. Quantification of overall INDEL frequency, as well as frequency of INDELs introducing a frameshift mutation, are identified for each sgRNA in Table 16. As shown in FIG. 3A, the sgRNA are further ranked based upon frequency of INDELs expected to disrupt the FAAH ORF through a frameshift mutation, with the top 3 sgRNA having a frequency exceeding 50%.

[0563] Quantification of FAAH mRNA levels by qPCR is provided in Table 16 as fold change for edited cells relative to control cells electroporated with SaCas9 protein only. Fold change was calculated by the 2\hat{ }(−ddCt) method. As shown in FIG. 3B, the sgRNA are further ranked based upon reduction of FAAH mRNA expression levels, with most sgRNAs resulting in a reduction of FAAH mRNA levels by 40% or more.

TABLE 15
TIDE Primer Sequences for Analysis of INDEL Frequency
at Cut Site Corresponding to SaCas9 sgRNAs

| | | SEQ | | SEQ | | SEQ | | SEQ | | SEQ |
|---|---|---|---|---|---|---|---|---|---|---|
| | PCR | ID | PCR | ID | Sequencing | ID | Sequencing | ID | Sequencing | ID |
| sgRNA | primer 1 | NO | primer 2 | NO | primer 1 | NO | primer 2 | NO | primer 3 | NO |
| SaCh 1 | TCTAACA | 1513 | AAGCTCT | 1529 | TCTAACA | 1545 | AAGCTCT | 1561 | CACTACG | 1577 |
| | GCTGGCA | | CCAGATC | | GCTGGCA | | CCAGATC | | CTCCGGC | |
| | TGTCTG | | CCCTTG | | TGTCTG | | CCCTTG | | AGTCACC | |
| SaCh 2 | TCTAACA | 1514 | AAGCTCT | 1530 | TCTAACA | 1546 | AAGCTCT | 1562 | CACTACG | 1578 |
| | GCTGGCA | | CCAGATC | | GCTGGCA | | CCAGATC | | CTCCGGC | |
| | TGTCTG | | CCCTTG | | TGTCTG | | CCCTTG | | AGTCACC | |
| SaCh 3 | TCTAACA | 1515 | AAGCTCT | 1531 | TCTAACA | 1547 | AAGCTCT | 1563 | CACTACG | 1579 |
| | GCTGGCA | | CCAGATC | | GCTGGCA | | CCAGATC | | CTCCGGC | |
| | TGTCTG | | CCCTTG | | TGTCTG | | CCCTTG | | AGTCACC | |
| SaCh 4 | TCTAACA | 1516 | AAGCTCT | 1532 | TCTAACA | 1548 | AAGCTCT | 1564 | CACTACG | 1580 |
| | GCTGGCA | | CCAGATC | | GCTGGCA | | CCAGATC | | CTCCGGC | |
| | TGTCTG | | CCCTTG | | TGTCTG | | CCCTTG | | AGTCACC | |
| SaCh 5 | TCTAACA | 1517 | AAGCTCT | 1533 | TCTAACA | 1549 | AAGCTCT | 1565 | CACTACG | 1581 |
| | GCTGGCA | | CCAGATC | | GCTGGCA | | CCAGATC | | CTCCGGC | |
| | TGTCTG | | CCCTTG | | TGTCTG | | CCCTTG | | AGTCACC | |
| SaCh 6 | CATCAGT | 1518 | AGACCAG | 1534 | CATCAGT | 1550 | AGACCAG | 1566 | AGACCAG | 1566 |
| | CTGGAGC | | ACTTGTT | | CTGGAGC | | ACTTGTT | | ACTTGTT | |
| | TAGGCA | | GCCCAA | | TAGGCA | | GCCCAA | | GCCCAA | |
| SaCh 7 | CATCAGT | 1519 | AGACCAG | 1535 | CATCAGT | 1551 | AGACCAG | 1567 | AGACCAG | 1567 |
| | CTGGAGC | | ACTTGTT | | CTGGAGC | | ACTTGTT | | ACTTGTT | |
| | TAGGCA | | GCCCAA | | TAGGCA | | GCCCAA | | GCCCAA | |
| SaCh 8 | CATCAGT | 1520 | AGACCAG | 1536 | CATCAGT | 1552 | AGACCAG | 1568 | AGACCAG | 1568 |
| | CTGGAGC | | ACTTGTT | | CTGGAGC | | ACTTGTT | | ACTTGTT | |
| | TAGGCA | | GCCCAA | | TAGGCA | | GCCCAA | | GCCCAA | |
| SaCh 9 | GACCAAC | 1521 | TCTGAAC | 1537 | GACCAAC | 1553 | TCTGAAC | 1569 | ACCTACA | 1582 |
| | TGTGTGA | | ACTCACC | | TGTGTGA | | ACTCACC | | AGGTATG | |
| | CCTCCT | | GCTTTG | | CCTCCT | | GCTTTG | | CTCTGC | |
| SaCh 10 | GACCAAC | 1522 | TCTGAAC | 1538 | GACCAAC | 1554 | TCTGAAC | 1570 | ACCTACA | 1583 |
| | TGTGTGA | | ACTCACC | | TGTGTGA | | ACTCACC | | AGGTATG | |
| | CCTCCT | | GCTTTG | | CCTCCT | | GCTTTG | | CTCTGC | |
| SaCh 11 | GACCAAC | 1523 | TCTGAAC | 1539 | GACCAAC | 1555 | TCTGAAC | 1571 | ACCTACA | 1584 |
| | TGTGTGA | | ACTCACC | | TGTGTGA | | ACTCACC | | AGGTATG | |
| | CCTCCT | | GCTTTG | | CCTCCT | | GCTTTG | | CTCTGC | |
| SaCh 12 | GACCAAC | 1524 | TCTGAAC | 1540 | GACCAAC | 1556 | TCTGAAC | 1572 | ACCTACA | 1585 |
| | TGTGTGA | | ACTCACC | | TGTGTGA | | ACTCACC | | AGGTATG | |
| | CCTCCT | | GCTTTG | | CCTCCT | | GCTTTG | | CTCTGC | |
| SaCh 13 | GACCAAC | 1525 | TCTGAAC | 1541 | GACCAAC | 1557 | TCTGAAC | 1573 | ACCTACA | 1586 |
| | TGTGTGA | | ACTCACC | | TGTGTGA | | ACTCACC | | AGGTATG | |
| | CCTCCT | | GCTTTG | | CCTCCT | | GCTTTG | | CTCTGC | |
| SaCh 14 | GACCAAC | 1526 | TCTGAAC | 1542 | GACCAAC | 1558 | TCTGAAC | 1574 | ACCTACA | 1587 |
| | TGTGTGA | | ACTCACC | | TGTGTGA | | ACTCACC | | AGGTATG | |
| | CCTCCT | | GCTTTG | | CCTCCT | | GCTTTG | | CTCTGC | |
| SaCh 15 | GACCAAC | 1527 | TCTGAAC | 1543 | GACCAAC | 1559 | TCTGAAC | 1575 | ACCTACA | 1588 |
| | TGTGTGA | | ACTCACC | | TGTGTGA | | ACTCACC | | AGGTATG | |
| | CCTCCT | | GCTTTG | | CCTCCT | | GCTTTG | | CTCTGC | |
| SaCh 16 | GACCAAC | 1528 | TCTGAAC | 1544 | GACCAAC | 1560 | TCTGAAC | 1576 | ACCTACA | 1589 |
| | TGTGTGA | | ACTCACC | | TGTGTGA | | ACTCACC | | AGGTATG | |
| | CCTCCT | | GCTTTG | | CCTCCT | | GCTTTG | | CTCTGC | |

TABLE 16
Quantification of Editing Efficiency and Functional Activity
of SaCas9 sgRNAs Targeting FAAH Coding Sequence

| | | | fold | fold |
|---|---|---|---|---|
| Name | Total Indel % | Eff-3N* | change1** | change2** |
| SaCh1 | 53.9 | 42.8 | 0.082 | 0.054 |
| SaCh2 | 20.1 | 15 | 0.816 | 0.580 |
| SaCh3 | 51.2 | 32.5 | 0.321 | 0.249 |
| SaCh4 | 15.1 | 11.9 | 1.123 | 0.881 |
| SaCh5 | 54.5 | 45 | 0.456 | 0.337 |
| SaCh6 | 9.4 | 7.8 | 0.882 | 0.700 |
| SaCh7 | 86.3 | 25.9 | 0.357 | 0.422 |
| SaCh8 | 15.9 | 9.3 | 0.585 | 0.589 |
| SaCh9 | 7.4 | 5.3 | 0.429 | 0.474 |
| SaCh10 | 46.7 | 22.6 | 0.217 | 0.289 |
| SaCh11 | 65.1 | 55.4 | 0.092 | 0.122 |
| SaCh12 | 78.4 | 73.6 | 0.122 | 0.151 |
| SaCh13 | 67 | 59.7 | | |
| SaCh14 | 42.4 | 15.2 | 0.577 | 0.490 |
| SaCh15 | 53.2 | 22.9 | 0.286 | 0.300 |
| SaCh16 | 41.9 | 31.2 | 0.522 | 0.454 |

*EFF-3N = total frequency of INDELs minus frequency of in-frame INDELs (e.g., ±3 nt, ±6 nt, ±9 nt, etc). The sgRNAs with values in underline have cut sites outside exon 1, exon 2, or exon 4 of FAAH, wherein frameshift mutations are not applicable.
**control = 1.00

### Example 5: In Silico Identification of gRNA Target Sequences for Inducing a Microdeletion in FAAH-OUT

[0564] It was investigated whether use of a CRISPR/Cas9 genome editing system to induce a microdeletion in FAAH-OUT would result in decreased levels of FAAH expression.

[0565] The 5′ end of the PT microdeletion is approximately 4.7 kb downstream the FAAH 3′ UTR, and is schematically depicted in FIG. 4. The microdeletion removes regulatory elements, including FOP and FOC. The DNaseI hypersensitivity cluster is targeted by the known gRNA “FOP1”, and the conserved region is targeted by the known gRNA “FOC1” (see, e.g., Mikaeli, et al (2019) bioRxiv, 633396). Approximately location of these elements are depicted in the schematic provide by FIG. 4. and further identified in Table 17.

TABLE 17
Chromosomal location of regions of FAAH-OUT

| Region of FAAH-OUT | Chromosome Location* |
|---|---|
| FOP | chr1: 46,422,536 (±200 bp)-46,422-695 (±200 bp) |
| FOP1 target sequence | Chr1: 46,422,643-46,422,663 |
| FOC | Chr1: 46,424,520 (±200 bp)-46,425,325 (±200 bp) |
| FOC1 target sequence | Chr1: 46,424,886-46,424,906 |
| Exon 1 | Chr1: 46,422,994-46,424,020 |
| Exon 2 | chr1: 46,426,339-46,426,460 |
| Exon 3 | chr1: 46,432,135-46,432,248 |
| PT microdeletion | Chr1: 46,418,743 (±600 bp)-46,426,873 (±600 bp) |

*According to human reference genome Hg38

[0566] Accordingly, a dual gRNA approach was developed to induce a microdeletion to remove regulatory elements, intronic elements, and/or coding sequence of FAAH-OUT, such as those removed by the PT microdeletion. In this approach, a first gRNA is combined with a second gRNA and Cas9 to induce two DSBs that result in a microdeletion. The first gRNA produces a DSB at an upstream target sequence in FAAH-OUT, and the second gRNA produces a DSB at a downstream target sequence in FAAH-OUT. Suitable regions for the target sequence of the first gRNA include a sequence upstream or within FOP. Suitable regions for the target sequence of the second gRNA include a sequence within or downstream FOC. As used herein, the first gRNA is referred to as the “left gRNA”, and the second gRNA is referred to as the “right gRNA”.

[0567] Thus, FAAH-OUT was evaluated for candidate gRNA target sequences using the CCTop algorithm based upon prediction of off-target sites with up to 4 mismatches in the human genome (Hg38). The region of FAAH-OUT evaluated for potential target sequences encompassed the PT microdeletion. A region extending from approximately 1 kb upstream the PT microdeletion (i.e., approximately 1 k upstream chr1:46,418,743 of Hg38) to approximately 1 kb downstream the PT microdeletion (i.e., approximately 1 kb downstream chr1:46,426,873 of Hg38) was evaluated for target sequences, as depicted by the schematic in FIG. 4. Specifically, the region was evaluated for 20 bp target sequences immediately upstream an SpCas9 PAM (pattern: N₂₀NGG (N=A,G,C,T); SEQ ID NO: 1282); 20 bp target sequences immediately upstream a SluCas9 PAM (pattern: N₂₀NNGG (N=A,G,C,T); SEQ ID NO: 1283); and 21 bp target sequences immediately upstream a SaCas9 PAM (pattern: N₂₁NNGRRT (N=A,G,C,T; R=A,G); SEQ ID NO: 1284).

[0568] The analysis identified approximately 2756 gRNA target sequences upstream SpCas9 PAM (NGG), approximately 2202 gRNA target sequences upstream SluCas9 PAM (NNGG), and approximately 470 gRNA target sequences upstream SaCas9 PAM (NNGRRT).

[0569] Subsequently, spacer sequences corresponding to the gRNA target sequences for SpCas9, SluCas9, and SaCas9 were filtered using the CCTop algorithm. Specifically, spacers were filtered to remove any that had one or more perfect matches to a different target site in the human genome (Hg38). Spacers were removed that were predicted to have either (i) one or more off-target sites with one mismatch; or (ii) three or more off-target sites with two mismatches. Moreover, spacers were selected for target sequences having a minor allele frequency of less than or equal to 0.001 in the human population. Finally, spacers were removed if the target sequence contained a homopolymer (i.e., consecutive sequence of five or more identical nucleotides, e.g., “AAAAA”, “CCCCC”, “GGGGG”, “TTTTT”). For SluCas9 and SpCas9 spacer sequences, certain spacers were removed that corresponded to difficult to sequence regions. SluCas9 and SpCas9 spacer sequences were selected for target sequences outside of the central FOP1-FOC1 region (chr1: 46,422,693-46,424,836). Also for SluCas9 and SpCas9 spacer sequences, CCTop score filters were applied to further eliminate spacer sequence with Raw CCTop score greater than −500 (SluCas9 spacers) and Raw CCTop score greater than −600 (SpCas9 spacers).

[0570] Based on this analysis, 185 spacer sequences for SpCas9 (Table 18; target sequences identified by SEQ ID NOs: 181-365; spacer sequences identified by SEQ ID NOs: 366-350, 186 spacer sequences for SluCas9 (Table 19; target sequences identified by SEQ ID NOs: 551-736; spacer sequences identified by SEQ ID NOs: 737-922); and 172 spacer sequences for SaCas9 (Table 20; target sequences identified by SEQ ID NOs: 923-1094; spacer sequences identified by SEQ ID NOs: 1095-1266) were identified. Target sequences identified upstream a SluCas9 PAM were extended to include 22 bp.

TABLE 18
Target and Spacer Sequences for SpCas9 gRNAs in FAAH-OUT

| | | SEQ | | SEQ | |
|---|---|---|---|---|---|
| | Target Sequence | ID | | ID | Cut site |
| Name | PAM in bold underline | NO | Spacer Sequence | NO | location* |
| SpM1 | TTGTAGCATTATCACTCTCTGAG | 181 | UUGUAGCAUUAUCACUCUCU | 366 | 46418017 |
| SpM2 | CAGAGAGTGATAATGCTACAAAG | 182 | CAGAGAGUGAUAAUGCUACA | 367 | 46418005 |
| SpM3 | ACTATGAGCCATCTACTTTCTGG | 183 | ACUAUGAGCCAUCUACUUUC | 368 | 46418398 |
| SpM4 | CTATGAGCCATCTACTTTCTGGG | 184 | CUAUGAGCCAUCUACUUUCU | 369 | 46418399 |
| SpM5 | TGAAGTGCCCAGAAAGTAGATGG | 185 | UGAAGUGCCCAGAAAGUAGA | 370 | 46418396 |
| SpM6 | AGGGTTCACAGAGGATTAAATGG | 186 | AGGGUUCACAGAGGAUUAAA | 371 | 46418427 |
| SpM7 | ATCCTCTGTGAACCCTATGATGG | 187 | AUCCUCUGUGAACCCUAUGA | 372 | 46418444 |
| SpM8 | TTCTGGCCATCGTACTCACTGGG | 188 | UUCUGGCCAUCGUACUCACU | 373 | 46418590 |
| SpM9 | CTTCTGGCCATCGTACTCACTGG | 189 | CUUCUGGCCAUCGUACUCAC | 374 | 46418591 |
| SpM10 | GATTTGTGCTCTCACTCTTCTGG | 190 | GAUUUGUGCUCUCACUCUUC | 375 | 46418607 |
| SpM11 | GGCAGTAGCCACCAGCACACTGG | 191 | GGCAGUAGCCACCAGCACAC | 376 | 46418657 |
| SpM12 | AGATGTCCAGTCTGGAGCCCAGG | 192 | AGAUGUCCAGUCUGGAGCCC | 377 | 46419046 |
| SpM13 | ATTGTTGGAGATGTCCAGTCTGG | 193 | AUUGUUGGAGAUGUCCAGUC | 378 | 46419054 |
| SpM14 | ATCTCCAACAATCTTTCACATGG | 194 | AUCUCCAACAAUCUUUCACA | 379 | 46419075 |
| SpM15 | ACTGCCATGTGAAAGATTGTTGG | 195 | ACUGCCAUGUGAAAGAUUGU | 380 | 46419069 |
| SpM16 | CAATCTTTCACATGGCAGTTAGG | 196 | CAAUCUUUCACAUGGCAGUU | 381 | 46419083 |
| SpM17 | CATAACAAGGCTTCTGGACTTGG | 197 | CAUAACAAGGCUUCUGGACU | 382 | 46419131 |
| SpM18 | GCAGGTCATAACAAGGCTTCTGG | 198 | GCAGGUCAUAACAAGGCUUC | 383 | 46419137 |
| SpM19 | AAGCCTTGTTATGACCTGCAAGG | 199 | AAGCCUUGUUAUGACCUGCA | 384 | 46419151 |
| SpM20 | TGGCCTTGCAGGTCATAACAAGG | 200 | UGGCCUUGCAGGUCAUAACA | 385 | 46419144 |
| SpM21 | CAGGTTAATCATGGCCTTGCAGG | 201 | CAGGUUAAUCAUGGCCUUGC | 386 | 46419155 |
| SpM22 | CTGCAGGGTCAGGTTAATCATGG | 202 | CUGCAGGGUCAGGUUAAUCA | 387 | 46419164 |
| SpM23 | GATTAACCTGACCCTGCAGCTGG | 203 | GAUUAACCUGACCCUGCAGC | 388 | 46419178 |
| SpM24 | GTGCTCACAGCCCGGCCACGTGG | 204 | GUGCUCACAGCCCGGCCACG | 389 | 46419232 |
| SpM25 | AGCCCGGCCACGTGGCCTGCAGG | 205 | AGCCCGGCCACGUGGCCUGC | 390 | 46419240 |
| SpM26 | TACCTGCAGGCCACGTGGCCGGG | 206 | UACCUGCAGGCCACGUGGCC | 391 | 46419232 |
| SpM27 | TTACCTGCAGGCCACGTGGCCGG | 207 | UUACCUGCAGGCCACGUGGC | 392 | 46419233 |
| SpM28 | AACATTACCTGCAGGCCACGTGG | 208 | AACAUUACCUGCAGGCCACG | 393 | 46419237 |
| SpM29 | GTGTTCTGAACATTACCTGCAGG | 209 | GUGUUCUGAACAUUACCUGC | 394 | 46419245 |
| SpM30 | CTCTTGGTGCTTGCTGTGCCTGG | 210 | CUCUUGGUGCUUGCUGUGCC | 395 | 46419307 |
| SpM31 | TGTGCCTGGAGTGTTGTTCCTGG | 211 | UGUGCCUGGAGUGUUGUUCC | 396 | 46419321 |
| SpM32 | GTGCCTGGAGTGTTGTTCCTGGG | 212 | GUGCCUGGAGUGUUGUUCCU | 397 | 46419322 |
| SpM33 | ACGAGTAGGTGGTCTTTAGGTGG | 213 | ACGAGUAGGUGGUCUUUAGG | 398 | 46419339 |
| SpM34 | AAAGACCACCTACTCGTCCAAGG | 214 | AAAGACCACCUACUCGUCCA | 399 | 46419355 |
| SpM35 | TGGACGAGTAGGTGGTCTTTAGG | 215 | UGGACGAGUAGGUGGUCUUU | 400 | 46419342 |
| SpM36 | CACCTACTCGTCCAAGGTGAGGG | 216 | CACCUACUCGUCCAAGGUGA | 401 | 46419361 |
| SpM37 | CCTCACCTTGGACGAGTAGGTGG | 217 | CCUCACCUUGGACGAGUAGG | 402 | 46419350 |
| SpM38 | TGCCCTCACCTTGGACGAGTAGG | 218 | UGCCCUCACCUUGGACGAGU | 403 | 46419353 |
| SpM39 | TCAACACAGCCTGACAGAGTTGG | 219 | UCAACACAGCCUGACAGAGU | 404 | 46419385 |
| SpM40 | ACCCAACATCTGTTAGGCTGTGG | 220 | ACCCAACAUCUGUUAGGCUG | 405 | 46419474 |
| SpM41 | TCCACAGCCTAACAGATGTTGGG | 221 | UCCACAGCCUAACAGAUGUU | 406 | 46419465 |
| SpM42 | TGTAGGTCACGCCCTTTCCTTGG | 222 | UGUAGGUCACGCCCUUUCCU | 407 | 46420652 |
| SpM43 | AACTAAAGATACATCTGGCTGGG | 223 | AACUAAAGAUACAUCUGGCU | 408 | 46420712 |
| SpM44 | GAACTAAAGATACATCTGGCTGG | 224 | GAACUAAAGAUACAUCUGGC | 409 | 46420713 |
| SpM45 | ATGTGAACTAAAGATACATCTGG | 225 | AUGUGAACUAAAGAUACAUC | 410 | 46420717 |
| SpM46 | TTTCTCTGGCTGGGCTTAGCTGG | 226 | UUUCUCUGGCUGGGCUUAGC | 411 | 46420749 |
| SpM47 | TTCTCTGGCTGGGCTTAGCTGGG | 227 | UUCUCUGGCUGGGCUUAGCU | 412 | 46420750 |
| SpM48 | TATGTGTAGGAAACTTGGGAGGG | 228 | UAUGUGUAGGAAACUUGGGA | 413 | 46420763 |
| SpM49 | CTATGTGTAGGAAACTTGGGAGG | 229 | CUAUGUGUAGGAAACUUGGG | 414 | 46420764 |
| SpM50 | AATCTATGTGTAGGAAACTTGGG | 230 | AAUCUAUGUGUAGGAAACUU | 415 | 46420767 |
| SpM51 | AAGGTGAAGCCACTTGGGATCGG | 231 | AAGGUGAAGCCACUUGGGAU | 416 | 46420827 |
| SpM52 | TCCATTCAACAAGCCTTCTCTGG | 232 | UCCAUUCAACAAGCCUUCUC | 417 | 46420888 |
| SpM53 | AGGCTTGTTGAATGGAGCAATGG | 233 | AGGCUUGUUGAAUGGAGCAA | 418 | 46420905 |
| SpM54 | GGCTTGTTGAATGGAGCAATGGG | 234 | GGCUUGUUGAAUGGAGCAAU | 419 | 46420906 |
| SpM55 | GCAATGGGTGACTTGTTATTAGG | 235 | GCAAUGGGUGACUUGUUAUU | 420 | 46420921 |
| SpM56 | CAATGGGTGACTTGTTATTAGGG | 236 | CAAUGGGUGACUUGUUAUUA | 421 | 46420922 |
| SpM57 | GCAAAGGGTCAGGGACTGATTGG | 237 | GCAAAGGGUCAGGGACUGAU | 422 | 46420991 |
| SpM58 | ATGGGCACTAATCAAGATCATGG | 238 | AUGGGCACUAAUCAAGAUCA | 423 | 46421322 |
| SpM59 | GATCTTGATTAGTGCCCATGAGG | 239 | GAUCUUGAUUAGUGCCCAUG | 424 | 46421336 |
| SpM60 | TGGGAATTATTTGTCCTCATGGG | 240 | UGGGAAUUAUUUGUCCUCAU | 425 | 46421340 |
| SpM61 | CTGGGAATTATTTGTCCTCATGG | 241 | CUGGGAAUUAUUUGUCCUCA | 426 | 46421341 |
| SpM62 | CTATAGGTTGAATGTAGACTGGG | 242 | CUAUAGGUUGAAUGUAGACU | 427 | 46421359 |
| SpM63 | GCTATAGGTTGAATGTAGACTGG | 243 | GCUAUAGGUUGAAUGUAGAC | 428 | 46421360 |
| SpM64 | TTCAACCTATAGCTTTCTCCTGG | 244 | UUCAACCUAUAGCUUUCUCC | 429 | 46421380 |
| SpM65 | ACAGACCAGGAGAAAGCTATAGG | 245 | ACAGACCAGGAGAAAGCUAU | 430 | 46421375 |
| SpM66 | TAGATGAGGATCTACAGACCAGG | 246 | UAGAUGAGGAUCUACAGACC | 431 | 46421388 |
| SpM67 | ATCCAACATCCGTTAGGCTGTGG | 247 | AUCCAACAUCCGUUAGGCUG | 432 | 46421525 |
| SpM68 | GGTTCAACTCCACAGCCTAACGG | 248 | GGUUCAACUCCACAGCCUAA | 433 | 46421524 |
| SpM69 | GGTTGCTCTCTGAACAACAATGG | 249 | GGUUGCUCUCUGAACAACAA | 434 | 46421625 |
| SpM70 | GCTCTCTGAACAACAATGGAGGG | 250 | GCUCUCUGAACAACAAUGGA | 435 | 46421629 |
| SpM71 | GGTTACCCTGAACATACTGTGGG | 251 | GGUUACCCUGAACAUACUGU | 436 | 46421693 |
| SpM72 | TGGTTACCCTGAACATACTGTGG | 252 | UGGUUACCCUGAACAUACUG | 437 | 46421694 |
| SpM73 | AGGCAGGGACTATTTCTGATTGG | 253 | AGGCAGGGACUAUUUCUGAU | 438 | 46421714 |
| SpM74 | TACATTTGATGTCTGTTTCCTGG | 254 | UACAUUUGAUGUCUGUUUCC | 439 | 46421756 |
| SpM75 | GTTTATTCTCATAATACCCAGGG | 255 | GUUUAUUCUCAUAAUACCCA | 440 | 46421822 |
| SpM76 | GGTTTATTCTCATAATACCCAGG | 256 | GGUUUAUUCUCAUAAUACCC | 441 | 46421823 |
| SpM77 | GGAATGAGTGTGTTTCAAGGAGG | 257 | GGAAUGAGUGUGUUUCAAGG | 442 | 46421960 |
| SpM78 | ATGCTGCTGATTTACTCTTGAGG | 258 | AUGCUGCUGAUUUACUCUUG | 443 | 46422002 |
| SpM79 | TTTACTCTTGAGGAGATCACTGG | 259 | UUUACUCUUGAGGAGAUCAC | 444 | 46422012 |
| SpM80 | TTACTCTTGAGGAGATCACTGGG | 260 | UUACUCUUGAGGAGAUCACU | 445 | 46422013 |
| SpM81 | TTAGGGAGGGTGTAAATCTGAGG | 261 | UUAGGGAGGGUGUAAAUCUG | 446 | 46422156 |
| SpM82 | TAGGGAGGGTGTAAATCTGAGGG | 262 | UAGGGAGGGUGUAAAUCUGA | 447 | 46422157 |
| SpM83 | GAGCTAGCAGCAACGCACAGAGG | 263 | GAGCUAGCAGCAACGCACAG | 448 | 46422238 |
| SpM84 | AGCTAGCAGCAACGCACAGAGGG | 264 | AGCUAGCAGCAACGCACAGA | 449 | 46422239 |
| SpM85 | ATGAGGTATGTGGTAACGGAAGG | 265 | AUGAGGUAUGUGGUAACGGA | 450 | 46422624 |
| SpM86 | TGAGGTATGTGGTAACGGAAGGG | 266 | UGAGGUAUGUGGUAACGGAA | 451 | 46422625 |
| SpM87 | GTAACGGAAGGGTGTAACCCAGG | 267 | GUAACGGAAGGGUGUAACCC | 452 | 46422636 |
| SpM88 | AGGCCTAGAGTGCTGTGCCGTGG | 268 | AGGCCUAGAGUGCUGUGCCG | 453 | 46422675 |
| SpM89 | GGCCTAGAGTGCTGTGCCGTGGG | 269 | GGCCUAGAGUGCUGUGCCGU | 454 | 46422676 |
| SpM90 | ATCCCACGGCACAGCACTCTAGG | 270 | AUCCCACGGCACAGCACUCU | 455 | 46422668 |
| SpM91 | GAGTGCTGTGCCGTGGGATGTGG | 271 | GAGUGCUGUGCCGUGGGAUG | 456 | 46422682 |
| SpM92 | CTGTGCCGTGGGATGTGGTGCGG | 272 | CUGUGCCGUGGGAUGUGGUG | 457 | 46422687 |
| SpM93 | TGTGCCGTGGGATGTGGTGCGGG | 273 | UGUGCCGUGGGAUGUGGUGC | 458 | 46422688 |
| SpM94 | GTCACCCGCACCACATCCCACGG | 274 | GUCACCCGCACCACAUCCCA | 459 | 46422682 |
| SpM95 | GATGTGGTGCGGGTGACAAGTGG | 275 | GAUGUGGUGCGGGUGACAAG | 460 | 46422698 |
| SpM96 | GGTGCGGGTGACAAGTGGCCTGG | 276 | GGUGCGGGUGACAAGUGGCC | 461 | 46422703 |
| SpM97 | GTGCGGGTGACAAGTGGCCTGGG | 277 | GUGCGGGUGACAAGUGGCCU | 462 | 46422704 |
| SpM98 | GGAGTTCATGAAGGTGGAGTGGG | 278 | GGAGUUCAUGAAGGUGGAGU | 463 | 46422752 |
| SpM99 | GTTACAGAGTGGGCAACTTCAGG | 279 | GUUACAGAGUGGGCAACUUC | 464 | 46422855 |
| SpM100 | TTACAGAGTGGGCAACTTCAGGG | 280 | UUACAGAGUGGGCAACUUCA | 465 | 46422856 |
| SpM101 | AGACAAACATAGACTGAGCCTGG | 281 | AGACAAACAUAGACUGAGCC | 466 | 46424709 |
| SpM102 | GACAAACATAGACTGAGCCTGGG | 282 | GACAAACAUAGACUGAGCCU | 467 | 46424710 |
| SpM103 | GACGGGTTGTCACATCCTCCAGG | 283 | GACGGGUUGUCACAUCCUCC | 468 | 46424736 |
| SpM104 | AGGATGTGACAACCCGTCTCTGG | 284 | AGGAUGUGACAACCCGUCUC | 469 | 46424751 |
| SpM105 | GGATGTGACAACCCGTCTCTGGG | 285 | GGAUGUGACAACCCGUCUCU | 470 | 46424752 |
| SpM106 | GGGATGGGCTCATGGTCTCTCGG | 286 | GGGAUGGGCUCAUGGUCUCU | 471 | 46424801 |
| SpM107 | TGATGATGGTGGACTCAGTCTGG | 287 | UGAUGAUGGUGGACUCAGUC | 472 | 46424840 |
| SpM108 | GATGATGGTGGACTCAGTCTGGG | 288 | GAUGAUGGUGGACUCAGUCU | 473 | 46424841 |
| SpM109 | GTGGACTCAGTCTGGGAGCCCGG | 289 | GUGGACUCAGUCUGGGAGCC | 474 | 46424848 |
| SpM110 | GACTCAGTCTGGGAGCCCGGAGG | 290 | GACUCAGUCUGGGAGCCCGG | 475 | 46424851 |
| SpM111 | AGTCTGGGAGCCCGGAGGTAGGG | 291 | AGUCUGGGAGCCCGGAGGUA | 476 | 46424856 |
| SpM112 | GAGGTGCTGTTCCCATGCTTTGG | 292 | GAGGUGCUGUUCCCAUGCUU | 477 | 46424895 |
| SpM113 | AAGCATGGGAACAGCACCTCAGG | 293 | AAGCAUGGGAACAGCACCUC | 478 | 46424882 |
| SpM114 | ACTCAGGAACTCCAAAGCATGGG | 294 | ACUCAGGAACUCCAAAGCAU | 479 | 46424896 |
| SpM115 | GGGCCATCAATCACCATCCAGGG | 295 | GGGCCAUCAAUCACCAUCCA | 480 | 46424932 |
| SpM116 | TCCTCCTCATCAACCAGGGAGGG | 296 | UCCUCCUCAUCAACCAGGGA | 481 | 46425063 |
| SpM117 | TTCCTCCTCATCAACCAGGGAGG | 297 | UUCCUCCUCAUCAACCAGGG | 482 | 46425064 |
| SpM118 | GACTTCCTCCTCATCAACCAGGG | 298 | GACUUCCUCCUCAUCAACCA | 483 | 46425067 |
| SpM119 | TGGTTGATGAGGAGGAAGTCTGG | 299 | UGGUUGAUGAGGAGGAAGUC | 484 | 46425080 |
| SpM120 | AGACTTCCTCCTCATCAACCAGG | 300 | AGACUUCCUCCUCAUCAACC | 485 | 46425068 |
| SpM121 | GGTTGATGAGGAGGAAGTCTGGG | 301 | GGUUGAUGAGGAGGAAGUCU | 486 | 46425081 |
| SpM122 | AGGAGGAAGTCTGGGCTAATGGG | 302 | AGGAGGAAGUCUGGGCUAAU | 487 | 46425089 |
| SpM123 | TCTGGGCTAATGGGTTGCAGTGG | 303 | UCUGGGCUAAUGGGUUGCAG | 488 | 46425098 |
| SpM124 | ACCCACCACCGCACACAGATGGG | 304 | ACCCACCACCGCACACAGAU | 489 | 46425152 |
| SpM125 | TACCCACCACCGCACACAGATGG | 305 | UACCCACCACCGCACACAGA | 490 | 46425153 |
| SpM126 | GGGTATAGCTTCCTTTACTGCGG | 306 | GGGUAUAGCUUCCUUUACUG | 491 | 46425181 |
| SpM127 | TGCTTTCTTGTGCCTCCTGCTGG | 307 | UGCUUUCUUGUGCCUCCUGC | 492 | 46425213 |
| SpM128 | GCTGGCATTTCATTGTGTTGTGG | 308 | GCUGGCAUUUCAUUGUGUUG | 493 | 46425231 |
| SpM129 | GTTGTGGTTGGTTGTGTGTCTGG | 309 | GUUGUGGUUGGUUGUGUGUC | 494 | 46425247 |
| SpM130 | TGGCTGTGTGGTTATGTGCCTGG | 310 | UGGCUGUGUGGUUAUGUGCC | 495 | 46425272 |
| SpM131 | TGTGTGGTTATGTGCCTGGCTGG | 311 | UGUGUGGUUAUGUGCCUGGC | 496 | 46425276 |
| SpM132 | GTGTGCATGTGTTGGGTTATTGG | 312 | GUGUGCAUGUGUUGGGUUAU | 497 | 46425299 |
| SpM133 | GCATGTGTTGGGTTATTGGTTGG | 313 | GCAUGUGUUGGGUUAUUGGU | 498 | 46425303 |
| SpM134 | TGTGTACATCTAGCTATGTGTGG | 314 | UGUGUACAUCUAGCUAUGUG | 499 | 46425328 |
| SpM135 | CTAGCTATGTGTGGCTGGTGTGG | 315 | CUAGCUAUGUGUGGCUGGUG | 500 | 46425337 |
| SpM136 | TAGCTATGTGTGGCTGGTGTGGG | 316 | UAGCUAUGUGUGGCUGGUGU | 501 | 46425338 |
| SpM137 | CTGGTGTGGGTCTGAATGTCTGG | 317 | CUGGUGUGGGUCUGAAUGUC | 502 | 46425351 |
| SpM138 | CAGCTGGTTTGGTATGTGTCTGG | 318 | CAGCUGGUUUGGUAUGUGUC | 503 | 46425416 |
| SpM139 | AGCTGGTTTGGTATGTGTCTGGG | 319 | AGCUGGUUUGGUAUGUGUCU | 504 | 46425417 |
| SpM140 | TTGGTATGTGTCTGGGCATCTGG | 320 | UUGGUAUGUGUCUGGGCAUC | 505 | 46425424 |
| SpM141 | GCATCTGGTTGGTGAACATGTGG | 321 | GCAUCUGGUUGGUGAACAUG | 506 | 46425439 |
| SpM142 | TTGGTGAACATGTGGATGTCTGG | 322 | UUGGUGAACAUGUGGAUGUC | 507 | 46425447 |
| SpM143 | TGGTGAACATGTGGATGTCTGGG | 323 | UGGUGAACAUGUGGAUGUCU | 508 | 46425448 |
| SpM144 | CATGTGGATGTCTGGGCTGTTGG | 324 | CAUGUGGAUGUCUGGGCUGU | 509 | 46425455 |
| SpM145 | ATGTGGATGTCTGGGCTGTTGGG | 325 | AUGUGGAUGUCUGGGCUGUU | 510 | 46425456 |
| SpM146 | GGATGTCTGGGCTGTTGGGCTGG | 326 | GGAUGUCUGGGCUGUUGGGC | 511 | 46425460 |
| SpM147 | GATGTCTGGGCTGTTGGGCTGGG | 327 | GAUGUCUGGGCUGUUGGGCU | 512 | 46425461 |
| SpM148 | GTATATGTCTGGATGGCTGGAGG | 328 | GUAUAUGUCUGGAUGGCUGG | 513 | 46425496 |
| SpM149 | GTGTCTCCAGCCTCCCATTGTGG | 329 | GUGUCUCCAGCCUCCCAUUG | 514 | 46425552 |
| SpM150 | CAGCCTCCCATTGTGGTTTCAGG | 330 | CAGCCUCCCAUUGUGGUUUC | 515 | 46425559 |
| SpM151 | CATTGTGGTTTCAGGCTTCTTGG | 331 | CAUUGUGGUUUCAGGCUUCU | 516 | 46425567 |
| SpM152 | ACAGACCTGTATAGCTTGTTGGG | 332 | ACAGACCUGUAUAGCUUGUU | 517 | 46425601 |
| SpM153 | GACAGACCTGTATAGCTTGTTGG | 333 | GACAGACCUGUAUAGCUUGU | 518 | 46425602 |
| SpM154 | ACATGACTGAGAAGGTGCCCAGG | 334 | ACAUGACUGAGAAGGUGCCC | 519 | 46425624 |
| SpM155 | AGTGACAACCTCGAGACCTCAGG | 335 | AGUGACAACCUCGAGACCUC | 520 | 46425672 |
| SpM156 | GGTGGACACCTGAGGTCTCGAGG | 336 | GGUGGACACCUGAGGUCUCG | 521 | 46425670 |
| SpM157 | AGGTGTCCACCTTTATGTCCCGG | 337 | AGGUGUCCACCUUUAUGUCC | 522 | 46425692 |
| SpM158 | GGTGTCCACCTTTATGTCCCGGG | 338 | GGUGUCCACCUUUAUGUCCC | 523 | 46425693 |
| SpM159 | ATTTGTTTGCTGAGCCTGTGAGG | 339 | AUUUGUUUGCUGAGCCUGUG | 524 | 46425735 |
| SpM160 | AAGACCTGGAGAAATTCCCTGGG | 340 | AAGACCUGGAGAAAUUCCCU | 525 | 46425785 |
| SpM161 | CAAGACCTGGAGAAATTCCCTGG | 341 | CAAGACCUGGAGAAAUUCCC | 526 | 46425786 |
| SpM162 | TTTAGCACAAGTGTGAGTCAGGG | 342 | UUUAGCACAAGUGUGAGUCA | 527 | 46425857 |
| SpM163 | TCACCAGTTCTGTGGGCATCTGG | 343 | UCACCAGUUCUGUGGGCAUC | 528 | 46425963 |
| SpM164 | AGGAGGGTGGCTGGTCTGTCTGG | 344 | AGGAGGGUGGCUGGUCUGUC | 529 | 46426002 |
| SpM165 | AGCTCACTCACCACCCGTCTGGG | 345 | AGCUCACUCACCACCCGUCU | 530 | 46426038 |
| SpM166 | CAGCTCACTCACCACCCGTCTGG | 346 | CAGCUCACUCACCACCCGUC | 531 | 46426039 |
| SpM167 | CTGAACCTCATGGCACCTGTAGG | 347 | CUGAACCUCAUGGCACCUGU | 532 | 46426069 |
| SpM168 | GAAACGAGAAAGGCAGTACCAGG | 348 | GAAACGAGAAAGGCAGUACC | 533 | 46426107 |
| SpM169 | AAACGAGAAAGGCAGTACCAGGG | 349 | AAACGAGAAAGGCAGUACCA | 534 | 46426108 |
| SpM170 | CGAGAAAGGCAGTACCAGGGAGG | 350 | CGAGAAAGGCAGUACCAGGG | 535 | 46426111 |
| SpM171 | ACAGAAACACTGCCTCATCTGGG | 351 | ACAGAAACACUGCCUCAUCU | 536 | 46426131 |
| SpM172 | ATAATATTCCTAGGACCCATTGG | 352 | AUAAUAUUCCUAGGACCCAU | 537 | 46426178 |
| SpM173 | TAATATTCCTAGGACCCATTGGG | 353 | UAAUAUUCCUAGGACCCAUU | 538 | 46426179 |
| SpM174 | CCTAGGACCCATTGGGTAAATGG | 354 | CCUAGGACCCAUUGGGUAAA | 539 | 46426186 |
| SpM175 | CCATTTACCCAATGGGTCCTAGG | 355 | CCAUUUACCCAAUGGGUCCU | 540 | 46426176 |
| SpM176 | AGCTGGTCCATTTACCCAATGGG | 356 | AGCUGGUCCAUUUACCCAAU | 541 | 46426183 |
| SpM177 | CAGCTGGTCCATTTACCCAATGG | 357 | CAGCUGGUCCAUUUACCCAA | 542 | 46426184 |
| SpM178 | GTAAATGGACCAGCTGCTCATGG | 358 | GUAAAUGGACCAGCUGCUCA | 543 | 46426201 |
| SpM179 | ATGGACCAGCTGCTCATGGCTGG | 359 | AUGGACCAGCUGCUCAUGGC | 544 | 46426205 |
| SpM180 | TGCTCAAGCTACTCATGGCCAGG | 360 | UGCUCAAGCUACUCAUGGCC | 545 | 46426231 |
| SpM181 | TAATTAGAAGTTGTCTAGCATGG | 361 | UAAUUAGAAGUUGUCUAGCA | 546 | 46427784 |
| SpM182 | TGTGGCTTCTGTTGTTGGGCTGG | 362 | UGUGGCUUCUGUUGUUGGGC | 547 | 46427817 |
| SpM183 | GTGTAAGTGTTTGCTGGGTTTGG | 363 | GUGUAAGUGUUUGCUGGGUU | 548 | 46427961 |
| SpM184 | ATTTAAGTGTAAGTGTTTGCTGG | 364 | AUUUAAGUGUAAGUGUUUGC | 549 | 46427967 |
| SpM185 | TAAATGTTTACAGTGGTGCCTGG | 365 | UAAAUGUUUACAGUGGUGCC | 550 | 46428074 |

*chromosomal location of guide cut-site in chromosome 1 of human genome Hg38

TABLE 19
Target and Spacer Sequences for SluCas9 gRNAs in FAAH-OUT

| | | SEQ | | SEQ | |
|---|---|---|---|---|---|
| | Target Sequence | ID | | ID | Cut site |
| Name | PAM in bold underline | NO | Spacer Sequence | NO | location * |
| SluM1 | CCTACTATGAGCCATCTACTTTCTGG | 551 | c | 737 | 46418397 |
| SluM2 | CTACTATGAGCCATCTACTTTCTGGG | 552 | CUACUAUGAGCCAUCUACUUUC | 738 | 46418398 |
| SluM3 | CTGTGAAGTGCCCAGAAAGTAGATGG | 533 | CUGUGAAGUGCCCAGAAAGUAG | 739 | 46418397 |
| SluM4 | CATAGGGTTCACAGAGGATTAAATGG | 554 | CAUAGGGUUCACAGAGGAUUAA | 740 | 46418428 |
| SluM5 | TTAATCCTCTGTGAACCCTATGATGG | 555 | UUAAUCCUCUGUGAACCCUAUG | 741 | 46418443 |
| SluM6 | TAATCCTCTGTGAACCCTATGATGGG | 556 | UAAUCCUCUGUGAACCCUAUGA | 742 | 46418444 |
| SluM7 | CCAGGGTCCCACAGCTAGAAGTTGGG | 337 | CCAGGGUCCCACAGCUAGAAGU | 743 | 46418510 |
| SluM8 | ACTCTTCTGGCCATCGTACTCACTGG | 558 | ACUCUUCUGGCCAUCGUACUCA | 744 | 46418592 |
| SluM9 | GCTGATTTGTGCTCTCACTCTTCTGG | 339 | GCUGAUUUGUGCUCUCACUCUU | 745 | 46418608 |
| SluM10 | GGCAGTAGCCACCAGCACACTGGTGG | 560 | GGCAGUAGCCACCAGCACACUG | 746 | 46418655 |
| Slumll | ACAGGCAGTAGCCACCAGCACACTGG | 561 | ACAGGCAGUAGCCACCAGCACA | 747 | 46418658 |
| SluM12 | CCTCGCTTCCCTGGGCTCCAGACTGG | 562 | CCUCGCUUCCCUGGGCUCCAGA | 748 | 46419049 |
| SluM13 | CCAGTCTGGAGCCCAGGGAAGCGAGG | 563 | CCAGUCUGGAGCCCAGGGAAGC | 749 | 46419038 |
| SluM14 | GGAGATGTCCAGTCTGGAGCCCAGGG | 564 | GGAGAUGUCCAGUCUGGAGCCC | 750 | 46419046 |
| SluM15 | TGGAGATGTCCAGTCTGGAGCCCAGG | 565 | UGGAGAUGUCCAGUCUGGAGCC | 751 | 46419047 |
| SluM16 | AAGATTGTTGGAGATGTCCAGTCTGG | 566 | AAGAUUGUUGGAGAUGUCCAGU | 752 | 46419055 |
| SluM17 | GACATCTCCAACAATCTTTCACATGG | 567 | GACAUCUCCAACAAUCUUUCAC | 753 | 46419074 |
| SluM18 | CAACAATCTTTCACATGGCAGTTAGG | 368 | CAACAAUCUUUCACAUGGCAGU | 754 | 46419082 |
| SluM19 | CTAACTGCCATGTGAAAGATTGTTGG | 569 | CUAACUGCCAUGUGAAAGAUUG | 755 | 46419070 |
| SluM20 | GGTCATAACAAGGCTTCTGGACTTGG | 370 | GGUCAUAACAAGGCUUCUGGAC | 756 | 46419132 |
| SluM21 | CAGAAGCCTTGTTATGACCTGCAAGG | 571 | CAGAAGCCUUGUUAUGACCUGC | 757 | 46419150 |
| SluM22 | CTTGCAGGTCATAACAAGGCTTCTGG | 572 | CUUGCAGGUCAUAACAAGGCUU | 758 | 46419138 |
| SluM23 | TCATGGCCTTGCAGGTCATAACAAGG | 373 | UCAUGGCCUUGCAGGUCAUAAC | 759 | 46419145 |
| SluM24 | GGTCAGGTTAATCATGGCCTTGCAGG | 574 | GGUCAGGUUAAUCAUGGCCUUG | 760 | 46419156 |
| SluM25 | CATGATTAACCTGACCCTGCAGCTGG | 373 | CAUGAUUAACCUGACCCUGCAG | 761 | 46419177 |
| SluM26 | CAGCTGCAGGGTCAGGTTAATCATGG | 576 | CAGCUGCAGGGUCAGGUUAAUC | 762 | 46419165 |
| SluM27 | GCCCTTCCTCAGTGCTCACAGCCCGG | 377 | GCCCUUCCUCAGUGCUCACAGC | 763 | 46419223 |
| SluM28 | GCCGGGCTGTGAGCACTGAGGAAGGG | 378 | GCCGGGCUGUGAGCACUGAGGA | 764 | 46419213 |
| SluM29 | ACGTGGCCGGGCTGTGAGCACTGAGG | 379 | ACGUGGCCGGGCUGUGAGCACU | 765 | 46419218 |
| SluM30 | TCAGTGCTCACAGCCCGGCCACGTGG | 380 | UCAGUGCUCACAGCCCGGCCAC | 766 | 46419231 |
| SluM31 | CACAGCCCGGCCACGTGGCCTGCAGG | 381 | CACAGCCCGGCCACGUGGCCUG | 767 | 46419239 |
| SluM32 | CATTACCTGCAGGCCACGTGGCCGGG | 382 | CAUUACCUGCAGGCCACGUGGC | 768 | 46419233 |
| SluM33 | ACATTACCTGCAGGCCACGTGGCCGG | 383 | ACAUUACCUGCAGGCCACGUGG | 769 | 46419234 |
| SluM34 | CTGAACATTACCTGCAGGCCACGTGG | 384 | CUGAACAUUACCUGCAGGCCAC | 770 | 46419238 |
| SluM35 | TCGGTGTTCTGAACATTACCTGCAGG | 383 | UCGGUGUUCUGAACAUUACCUG | 771 | 46419246 |
| SluM36 | GCACAGCAAGCACCAAGAGCAAAGGG | 386 | GCACAGCAAGCACCAAGAGCAA | 772 | 46419291 |
| SluM37 | GGCACAGCAAGCACCAAGAGCAAAGG | 387 | GGCACAGCAAGCACCAAGAGCA | 773 | 46419292 |
| SluM38 | TTGCTCTTGGTGCTTGCTGTGCCTGG | 388 | UUGCUCUUGGUGCUUGCUGUGC | 774 | 46419306 |
| SluM39 | TGCTGTGCCTGGAGTGTTGTTCCTGG | 389 | UGCUGUGCCUGGAGUGUUGUUC | 775 | 46419320 |
| SluM40 | GCTGTGCCTGGAGTGTTGTTCCTGGG | 390 | GCUGUGCCUGGAGUGUUGUUCC | 776 | 46419321 |
| SluM41 | TGGACGAGTAGGTGGTCTTTAGGTGG | 591 | UGGACGAGUAGGUGGUCUUUAG | 777 | 46419340 |
| SluM42 | CCTAAAGACCACCTACTCGTCCAAGG | 592 | CCUAAAGACCACCUACUCGUCC | 778 | 46419354 |
| SluM43 | CCTTGGACGAGTAGGTGGTCTTTAGG | 393 | CCUUGGACGAGUAGGUGGUCUU | 779 | 46419343 |
| SluM44 | AGACCACCTACTCGTCCAAGGTGAGG | 594 | AGACCACCUACUCGUCCAAGGU | 780 | 46419359 |
| SluM45 | GACCACCTACTCGTCCAAGGTGAGGG | 393 | GACCACCUACUCGUCCAAGGUG | 781 | 46419360 |
| SluM46 | TGCCCTCACCTTGGACGAGTAGGTGG | 596 | UGCCCUCACCUUGGACGAGUAG | 782 | 46419351 |
| SluM47 | AATTGCCCTCACCTTGGACGAGTAGG | 397 | AAUUGCCCUCACCUUGGACGAG | 783 | 46419354 |
| SluM48 | CTTTCAACACAGCCTGACAGAGTTGG | 598 | CUUUCAACACAGCCUGACAGAG | 784 | 46419386 |
| SluM49 | ATTAATAGAACCCAACATCTGTTAGG | 599 | AUUAAUAGAACCCAACAUCUGU | 785 | 46419467 |
| SluM50 | AGAACCCAACATCTGTTAGGCTGTGG | 600 | AGAACCCAACAUCUGUUAGGCU | 786 | 46419473 |
| SluM51 | AACTCCACAGCCTAACAGATGTTGGG | 601 | AACUCCACAGCCUAACAGAUGU | 787 | 46419466 |
| SluM52 | AGTTGAATACCCATTATCTCATTTGG | 602 | AGUUGAAUACCCAUUAUCUCAU | 788 | 46419499 |
| SluM53 | TAGTTAGGGAGGGTGTAAATCTGAGG | 603 | UAGUUAGGGAGGGUGUAAAUCU | 789 | 46422155 |
| SluM54 | AGTTAGGGAGGGTGTAAATCTGAGGG | 604 | AGUUAGGGAGGGUGUAAAUCUG | 790 | 46422156 |
| SluM55 | GACTTAGCATGTTAAATGCTGCTAGG | 605 | GACUUAGCAUGUUAAAUGCUGC | 791 | 46422211 |
| SluM56 | AAAGAGCTAGCAGCAACGCACAGAGG | 606 | AAAGAGCUAGCAGCAACGCACA | 792 | 46422237 |
| SluM57 | AAGAGCTAGCAGCAACGCACAGAGGG | 607 | AAGAGCUAGCAGCAACGCACAG | 793 | 46422238 |
| SluM58 | GGGGGAAGTCAAGGTAGGAATGGAGG | 608 | GGGGGAAGUCAAGGUAGGAAUG | 794 | 46422262 |
| SluM59 | GGGGAAGTCAAGGTAGGAATGGAGGG | 609 | GGGGAAGUCAAGGUAGGAAUGG | 795 | 46422263 |
| SluM60 | CTCTTCAGTGAAGAAATGATGGCAGG | 610 | CUCUUCAGUGAAGAAAUGAUGG | 796 | 46422283 |
| SluM61 | GTATCTCTTCAGTGAAGAAATGATGG | 611 | GUAUCUCUUCAGUGAAGAAAUG | 797 | 46422287 |
| SluM62 | AAAATGAGGTATGTGGTAACGGAAGG | 612 | AAAAUGAGGUAUGUGGUAACGG | 798 | 46422623 |
| SluM63 | AAATGAGGTATGTGGTAACGGAAGGG | 613 | AAAUGAGGUAUGUGGUAACGGA | 799 | 46422624 |
| SluM64 | GTGGTAACGGAAGGGTGTAACCCAGG | 614 | GUGGUAACGGAAGGGUGUAACC | 800 | 46422635 |
| SluM65 | ACGAGGCCTAGAGTGCTGTGCCGTGG | 615 | ACGAGGCCUAGAGUGCUGUGCC | 801 | 46422674 |
| SluM66 | CGAGGCCTAGAGTGCTGTGCCGTGGG | 616 | CGAGGCCUAGAGUGCUGUGCCG | 802 | 46422675 |
| SluM67 | CTAGAGTGCTGTGCCGTGGGATGTGG | 617 | CUAGAGUGCUGUGCCGUGGGAU | 803 | 46422681 |
| SluM68 | CACATCCCACGGCACAGCACTCTAGG | 618 | CACAUCCCACGGCACAGCACUC | 804 | 46422669 |
| SluM69 | GTGCTGTGCCGTGGGATGTGGTGCGG | 619 | GUGCUGUGCCGUGGGAUGUGGU | 805 | 46422686 |
| SluM70 | TGCTGTGCCGTGGGATGTGGTGCGGG | 620 | UGCUGUGCCGUGGGAUGUGGUG | 806 | 46422687 |
| SluM71 | CTTGTCACCCGCACCACATCCCACGG | 621 | CUUGUCACCCGCACCACAUCCC | 807 | 46422683 |
| SluM72 | TGGGATGTGGTGCGGGTGACAAGTGG | 622 | UGGGAUGUGGUGCGGGUGACAA | 808 | 46422697 |
| SluM73 | TGTGGTGCGGGTGACAAGTGGCCTGG | 623 | UGUGGUGCGGGUGACAAGUGGC | 809 | 46422702 |
| SluM74 | GTGGTGCGGGTGACAAGTGGCCTGGG | 624 | GUGGUGCGGGUGACAAGUGGCC | 810 | 46422703 |
| SluM75 | ACTCAGTCTGGGAGCCCGGAGGTAGG | 625 | ACUCAGUCUGGGAGCCCGGAGG | 811 | 46424854 |
| SluM76 | CTCAGTCTGGGAGCCCGGAGGTAGGG | 626 | CUCAGUCUGGGAGCCCGGAGGU | 812 | 46424855 |
| SluM77 | CCTGAGGTGCTGTTCCCATGCTTTGG | 627 | CCUGAGGUGCUGUUCCCAUGCU | 813 | 46424894 |
| SluM78 | CCAAAGCATGGGAACAGCACCTCAGG | 628 | CCAAAGCAUGGGAACAGCACCU | 814 | 46424883 |
| SluM79 | GACACTCAGGAACTCCAAAGCATGGG | 629 | GACACUCAGGAACUCCAAAGCA | 813 | 46424897 |
| SluM80 | GGACACTCAGGAACTCCAAAGCATGG | 630 | GGACACUCAGGAACUCCAAAGC | 816 | 46424898 |
| SluM81 | CTCAGACAGAGAAGCTGCCCATTGGG | 631 | CUCAGACAGAGAAGCUGCCCAU | 817 | 46424954 |
| SluM82 | ACTCAGACAGAGAAGCTGCCCATTGG | 632 | ACUCAGACAGAGAAGCUGCCCA | 818 | 46424955 |
| SluM83 | GAGTATGTGTATTAATATTAATTAGG | 633 | GAGUAUGUGUAUUAAUAUUAAU | 819 | 46425005 |
| SluM84 | ACTTCCTCCTCATCAACCAGGGAGGG | 634 | ACUUCCUCCUCAUCAACCAGGG | 820 | 46425064 |
| SluM85 | GACTTCCTCCTCATCAACCAGGGAGG | 635 | GACUUCCUCCUCAUCAACCAGG | 821 | 46425065 |
| SluM86 | CCCTGGTTGATGAGGAGGAAGTCTGG | 636 | CCCUGGUUGAUGAGGAGGAAGU | 822 | 46425079 |
| SluM87 | CCTGGTTGATGAGGAGGAAGTCTGGG | 637 | CCUGGUUGAUGAGGAGGAAGUC | 823 | 46425080 |
| SluM88 | CCAGACTTCCTCCTCATCAACCAGGG | 638 | CCAGACUUCCUCCUCAUCAACC | 824 | 46425068 |
| SluM89 | CCCAGACTTCCTCCTCATCAACCAGG | 639 | CCCAGACUUCCUCCUCAUCAAC | 825 | 46425069 |
| Slum90 | ATGAGGAGGAAGTCTGGGCTAATGGG | 640 | AUGAGGAGGAAGUCUGGGCUAA | 826 | 46425088 |
| SluM91 | AAGTCTGGGCTAATGGGTTGCAGTGG | 641 | AAGUCUGGGCUAAUGGGUUGCA | 827 | 46425097 |
| SluM92 | TATACCCACCACCGCACACAGATGGG | 642 | UAUACCCACCACCGCACACAGA | 828 | 46425153 |
| SluM93 | CTATACCCACCACCGCACACAGATGG | 643 | CUAUACCCACCACCGCACACAG | 829 | 46425154 |
| SluM94 | GGTGGGTATAGCTTCCTTTACTGCGG | 644 | GGUGGGUAUAGCUUCCUUUACU | 830 | 46425180 |
| SluM95 | GCCTGCTTTCTTGTGCCTCCTGCTGG | 645 | GCCUGCUUUCUUGUGCCUCCUG | 831 | 46425212 |
| SluM96 | CCTGCTGGCATTTCATTGTGTTGTGG | 646 | CCUGCUGGCAUUUCAUUGUGUU | 832 | 46425230 |
| SluM97 | CCACAACACAATGAAATGCCAGCAGG | 647 | CCACAACACAAUGAAAUGCCAG | 833 | 46425219 |
| SluM98 | CTGGCATTTCATTGTGTTGTGGTTGG | 648 | CUGGCAUUUCAUUGUGUUGUGG | 834 | 46425234 |
| SluM99 | TGTGGTTGGTTGTGTGTCTGGTCTGG | 649 | UGUGGUUGGUUGUGUGUCUGGU | 835 | 46425251 |
| SluM100 | GTTGTGTGTCTGGTCTGGCTGTGTGG | 650 | GUUGUGUGUCUGGUCUGGCUGU | 836 | 46425259 |
| SluM101 | GTCTGGCTGTGTGGTTATGTGCCTGG | 651 | GUCUGGCUGUGUGGUUAUGUGC | 837 | 46425271 |
| SluM102 | GGCTGTGTGGTTATGTGCCTGGCTGG | 652 | GGCUGUGUGGUUAUGUGCCUGG | 838 | 46425275 |
| SluM103 | GCTGTGTGGTTATGTGCCTGGCTGGG | 653 | GCUGUGUGGUUAUGUGCCUGGC | 839 | 46425276 |
| SluM104 | TGCCTGGCTGGGTGTGCATGTGTTGG | 654 | UGCCUGGCUGGGUGUGCAUGUG | 840 | 46425290 |
| SluM105 | ACCCAACACATGCACACCCAGCCAGG | 655 | ACCCAACACAUGCACACCCAGC | 841 | 46423281 |
| SluM106 | TGGGTGTGCATGTGTTGGGTTATTGG | 656 | UGGGUGUGCAUGUGUUGGGUUA | 842 | 46425298 |
| SluM107 | TGTGCATGTGTTGGGTTATTGGTTGG | 657 | UGUGCAUGUGUUGGGUUAUUGG | 843 | 46425302 |
| SluM108 | GAGTGTGTACATCTAGCTATGTGTGG | 638 | GAGUGUGUACAUCUAGCUAUGU | 844 | 46425327 |
| SluM109 | GTGTACATCTAGCTATGTGTGGCTGG | 659 | GUGUACAUCUAGCUAuGUGUGG | 845 | 46425331 |
| SluMl10 | CATCTAGCTATGTGTGGCTGGTGTGG | 660 | CAUCUAGCUAUGUGUGGCUGGU | 846 | 46425336 |
| SluM111 | ATCTAGCTATGTGTGGCTGGTGTGGG | 661 | AUCUAGCUAUGUGUGGCUGGUG | 847 | 46425337 |
| SluM112 | TGGCTGGTGTGGGTCTGAATGTCTGG | 662 | UGGCUGGUGUGGGUCUGAAUGU | 848 | 46425350 |
| SluM113 | GTCTGGTAGAGAGTGTTTGTGTGTGG | 663 | GUCUGGUAGAGAGUGUUUGUGU | 849 | 46425370 |
| SluM114 | GTGTGGTTGTGTGTCTGATGTGTGGG | 664 | GUGUGGUUGUGUGUCUGAUGUG | 850 | 46425390 |
| SluM115 | GGGCAGCTGGTTTGGTATGTGTCTGG | 665 | GGGCAGCUGGUUUGGUAUGUGU | 831 | 46423415 |
| SluM116 | GGCAGCTGGTTTGGTATGTGTCTGGG | 666 | GGCAGCUGGUUUGGUAUGUGUC | 852 | 46423416 |
| SluM117 | GGTTTGGTATGTGTCTGGGCATCTGG | 667 | GGUUUGGUAUGUGUCUGGGCAU | 853 | 46425423 |
| SluMl18 | TGGTATGTGTCTGGGCATCTGGTTGG | 668 | UGGUAUGUGUCUGGGCAUCUGG | 854 | 46425427 |
| SluM119 | TGGGCATCTGGTTGGTGAACATGTGG | 669 | UGGGCAUCUGGUUGGUGAACAU | 833 | 46425438 |
| SluM120 | TGGTTGGTGAACATGTGGATGTCTGG | 670 | UGGUUGGUGAACAUGUGGAUGU | 856 | 46425446 |
| SluM121 | GGTTGGTGAACATGTGGATGTCTGGG | 671 | GGUUGGUGAACAUGUGGAUGUC | 857 | 46425447 |
| SluM122 | GAACATGTGGATGTCTGGGCTGTTGG | 672 | GAACAUGUGGAUGUCUGGGCUG | 858 | 46425454 |
| SluM123 | AACATGTGGATGTCTGGGCTGTTGGG | 673 | AACAUGUGGAUGUCUGGGCUGU | 859 | 46425455 |
| SluM124 | TGTGGATGTCTGGGCTGTTGGGCTGG | 674 | UGUGGAUGUCUGGGCUGUUGGG | 860 | 46425459 |
| SluM125 | GTGGATGTCTGGGCTGTTGGGCTGGG | 675 | GUGGAUGUCUGGGCUGUUGGGC | 861 | 46425460 |
| SluM126 | GGGGTATATGTCTGGATGGCTGGAGG | 676 | GGGGUAUAUGUCUGGAUGGCUG | 862 | 46425495 |
| SluM127 | CTGGATGGCTGGAGGAGTGGAAGAGG | 677 | CUGGAUGGCUGGAGGAGUGGAA | 863 | 46425506 |
| SluM128 | ATGGTGTCTCCAGCCTCCCATTGTGG | 678 | AUGGUGUCUCCAGCCUCCCAUU | 864 | 46425551 |
| SluM129 | CTCCAGCCTCCCATTGTGGTTTCAGG | 679 | CUCCAGCCUCCCAUUGUGGUUU | 865 | 46425558 |
| SluM130 | AGCCTGAAACCACAATGGGAGGCTGG | 680 | AGCCUGAAACCACAAUGGGAGG | 866 | 46425549 |
| SluM131 | AAGAAGCCTGAAACCACAATGGGAGG | 681 | AAGAAGCCUGAAACCACAAUGG | 867 | 46425553 |
| SluM132 | TCCCATTGTGGTTTCAGGCTTCTTGG | 682 | UCCCAUUGUGGUUUCAGGCUUC | 868 | 46425566 |
| SluM133 | GCCAAGAAGCCTGAAACCACAATGGG | 683 | GCCAAGAAGCCUGAAACCACAA | 869 | 46425556 |
| SluM134 | AGCCAAGAAGCCTGAAACCACAATGG | 684 | AGCCAAGAAGCCUGAAACCACA | 870 | 46425557 |
| SluM135 | CAACAAGCTATACAGGTCTGTCCTGG | 683 | CAACAAGCUAUACAGGUCUGUC | 871 | 46425615 |
| SluM136 | AGGACAGACCTGTATAGCTTGTTGGG | 686 | AGGACAGACCUGUAUAGCUUGU | 872 | 46425602 |
| SluM137 | CAGGACAGACCTGTATAGCTTGTTGG | 687 | CAGGACAGACCUGUAUAGCUUG | 873 | 46425603 |
| SluM138 | GTGACATGACTGAGAAGGTGCCCAGG | 688 | GUGACAUGACUGAGAAGGUGCC | 874 | 46425625 |
| SluM139 | CGAGGTTGTCACTGGCAGAGAGAGGG | 689 | CGAGGUUGUCACUGGCAGAGAG | 875 | 46425650 |
| SluM140 | TCGAGGTTGTCACTGGCAGAGAGAGG | 690 | UCGAGGUUGUCACUGGCAGAGA | 876 | 46425651 |
| SluM141 | GCCAGTGACAACCTCGAGACCTCAGG | 691 | GCCAGUGACAACCUCGAGACCU | 877 | 46423671 |
| SluM142 | ACCTGAGGTCTCGAGGTTGTCACTGG | 692 | ACCUGAGGUCUCGAGGUUGUCA | 878 | 46425661 |
| SluM143 | AAAGGTGGACACCTGAGGTCTCGAGG | 693 | AAAGGUGGACACCUGAGGUCUC | 879 | 46423671 |
| SluM144 | CTCAGGTGTCCACCTTTATGTCCCGG | 694 | CUCAGGUGUCCACCUUUAUGUC | 880 | 46425691 |
| SluM145 | TCAGGTGTCCACCTTTATGTCCCGGG | 695 | UCAGGUGUCCACCUUUAUGUCC | 881 | 46425692 |
| SluM146 | CGGGACATAAAGGTGGACACCTGAGG | 696 | CGGGACAUAAAGGUGGACACCU | 882 | 46425679 |
| SluM147 | GAATTTGTTTGCTGAGCCTGTGAGGG | 697 | GAAUUUGUUUGCUGAGCCUGUG | 883 | 46425735 |
| SluM148 | TGAATTTGTTTGCTGAGCCTGTGAGG | 698 | UGAAUUUGUUUGCUGAGCCUGU | 884 | 46425736 |
| SluM149 | AAAATTTCCCAGGGAATTTCTCCAGG | 699 | AAAAUUUCCCAGGGAAUUUCUC | 885 | 46425790 |
| SluM150 | GGCAAGACCTGGAGAAATTCCCTGGG | 700 | GGCAAGACCUGGAGAAAUUCCC | 886 | 46425786 |
| SluM151 | GGGCAAGACCTGGAGAAATTCCCTGG | 701 | GGGCAAGACCUGGAGAAAUUCC | 887 | 46425787 |
| Slum152 | AGAGCTCAGCACAGGGCAAGACCTGG | 702 | AGAGCUCAGCACAGGGCAAGAC | 888 | 46425800 |
| SluM153 | AGGTCTTGCCCTGTGCTGAGCTCTGG | 703 | AGGUCUUGCCCUGUGCUGAGCU | 889 | 46425813 |
| SluM154 | GGTCTTGCCCTGTGCTGAGCTCTGGG | 704 | GGUCUUGCCCUGUGCUGAGCUC | 890 | 46423814 |
| SluM155 | AGATGCCCACAGAACTGGTGACTTGG | 703 | AGAUGCCCACAGAACUGGUGAC | 891 | 46425977 |
| SluM156 | AAGTCACCAGTTCTGTGGGCATCTGG | 706 | AAGUCACCAGUUCUGUGGGCAU | 892 | 46425964 |
| SluM157 | GGCAGGAGGGTGGCTGGTCTGTCTGG | 707 | GGCAGGAGGGUGGCUGGUCUGU | 893 | 46426001 |
| SluM158 | GAGGGTGGCTGGTCTGTCTGGAGAGG | 708 | GAGGGUGGCUGGUCUGUCUGGA | 894 | 46426006 |
| SluM159 | GGTCTGTCTGGAGAGGATCATGTTGG | 709 | GGUCUGUCUGGAGAGGAUCAUG | 893 | 46426016 |
| SluM160 | TTCAGCTCACTCACCACCCGTCTGGG | 710 | UUCAGCUCACUCACCACCCGUC | 896 | 46426039 |
| SluM161 | GTTCAGCTCACTCACCACCCGTCTGG | 711 | GUUCAGCUCACUCACCACCCGU | 897 | 46426040 |
| SluM162 | GGTGGTGAGTGAGCTGAACCTCATGG | 712 | GGUGGUGAGUGAGCUGAACCUC | 898 | 46426058 |
| SluMl63 | GAGCTGAACCTCATGGCACCTGTAGG | 713 | GAGCUGAACCUCAUGGCACCUG | 899 | 46426068 |
| SluMl64 | GGAGAAACGAGAAAGGCAGTACCAGG | 714 | GGAGAAACGAGAAAGGCAGUAC | 900 | 46426106 |
| SluMl65 | GAGAAACGAGAAAGGCAGTACCAGGG | 715 | GAGAAACGAGAAAGGCAGUACC | 901 | 46426107 |
| SluMl66 | AAACGAGAAAGGCAGTACCAGGGAGG | 716 | AAACGAGAAAGGCAGUACCAGG | 902 | 46426110 |
| SluMl67 | AACGAGAAAGGCAGTACCAGGGAGGG | 717 | AACGAGAAAGGCAGUACCAGGG | 903 | 46426111 |
| SluM168 | TCTACAGAAACACTGCCTCATCTGGG | 718 | UCUACAGAAACACUGCCUCAUC | 904 | 46426132 |
| SluMl69 | TTCTACAGAAACACTGCCTCATCTGG | 719 | UUCUACAGAAACACUGCCUCAU | 905 | 46426133 |
| SluMl70 | AAAATAATATTCCTAGGACCCATTGG | 720 | AAAAUAAUAUUCCUAGGACCCA | 906 | 46426177 |
| SluMl71 | AAATAATATTCCTAGGACCCATTGGG | 721 | AAAUAAUAUUCCUAGGACCCAU | 907 | 46426178 |
| SluMl72 | ATTCCTAGGACCCATTGGGTAAATGG | 722 | AUUCCUAGGACCCAUUGGGUAA | 908 | 46426185 |
| SluM173 | GGTCCATTTACCCAATGGGTCCTAGG | 723 | GGUCCAUUUACCCAAUGGGUCC | 909 | 46426177 |
| SluMl74 | AGCAGCTGGTCCATTTACCCAATGGG | 724 | AGCAGCUGGUCCAUUUACCCAA | 910 | 46426184 |
| SluMl75 | GAGCAGCTGGTCCATTTACCCAATGG | 725 | GAGCAGCUGGUCCAUUUACCCA | 911 | 46426185 |
| SluMl76 | TGGGTAAATGGACCAGCTGCTCATGG | 726 | UGGGUAAAUGGACCAGCUGCUC | 912 | 46426200 |
| SluMl77 | TAAATGGACCAGCTGCTCATGGCTGG | 727 | UAAAUGGACCAGCUGCUCAUGG | 913 | 46426204 |
| SluMl78 | CACTAATTAGAAGTTGTCTAGCATGG | 728 | CACUAAUUAGAAGUUGUCUAGC | 914 | 46427783 |
| SluM179 | GCTAAGAGTGTGGCTTCTGTTGTTGG | 729 | GCUAAGAGUGUGGCUUCUGUUG | 915 | 46427811 |
| SluM180 | CTAAGAGTGTGGCTTCTGTTGTTGGG | 730 | CUAAGAGUGUGGCUUCUGUUGU | 916 | 46427812 |
| SluM181 | GAGTGTGGCTTCTGTTGTTGGGCTGG | 731 | GAGUGUGGCUUCUGUUGUUGGG | 917 | 46427816 |
| SluM182 | GTGTAAGTGTTTGCTGGGTTTGGTGG | 732 | GUGUAAGUGUUUGCUGGGUUUG | 918 | 46427959 |
| SluMl83 | TAAGTGTAAGTGTTTGCTGGGTTTGG | 733 | UAAGUGUAAGUGUUUGCUGGGU | 919 | 46427962 |
| SluMl84 | TCATTTAAGTGTAAGTGTTTGCTGGG | 734 | UCAUUUAAGUGUAAGUGUUUGC | 920 | 46427967 |
| SluMl85 | GTCATTTAAGTGTAAGTGTTTGCTGG | 733 | GUCAUUUAAGUGUAAGUGUUUG | 921 | 46427968 |
| SluMl86 | TAATAAATGTTTACAGTGGTGCCTGG | 736 | UAAUAAAUGUUUACAGUGGUGC | 922 | 46428073 |

* chromosomal location of guide cut-site in chromosome 1 of human genome Hg38

TABLE 20
Target and Spacer Sequences for SaCas9 gRNAs in FAAH-OUT

| | | SEQ | | SEQ | |
|---|---|---|---|---|---|
| | Target Sequence | ID | | ID | Cut site |
| Name | PAM in bold underline | NO | Spacer Sequence | NO | location* |
| saM1 | TCATCACTTGTTCTTGGCTTAGAGGAT | 923 | UCAUCACUUGUUCUUGGCUUA | 1095 | 46418107 |
| saM2 | AGGATGGTGCTCCACAAATTCTGGGAT | 924 | AGGAUGGUGCUCCACAAAUUC | 1096 | 46418129 |
| saM3 | CACAGCCACACTTTATCATCCCAGAAT | 925 | CACAGCCACACUUUAUCAUCC | 1097 | 46418138 |
| saM4 | GTGAGGGGCCAAGGCACTGTGCTGGGT | 926 | GUGAGGGGCCAAGGCACUGUG | 1098 | 46418172 |
| saM5 | CTCGTGGAGCTCACATTCTGGAGGGAT | 927 | CUCGUGGAGCUCACAUUCUGG | 1099 | 46418236 |
| saM6 | CTCACATTCTGGAGGGATTTGTTGAAT | 928 | CUCACAUUCUGGAGGGAUUUG | 1100 | 46418245 |
| saM7 | GACCTCTAAATATTTAATGTCTGGAGT | 929 | GACCUCUAAAUAUUUAAUGUC | 1101 | 46418306 |
| saM8 | GGGAATTCTAGACCACATTTACTGAGT | 930 | GGGAAUUCUAGACCACAUUUA | 1102 | 46418368 |
| saM9 | AGGTACTCAGTAAATGTGGTCTAGAAT | 931 | AGGUACUCAGUAAAUGUGGUC | 1103 | 46418364 |
| saM10 | TTCTGTTGATGCCAAGCCCCAGTGAGT | 932 | UUCUGUUGAUGCCAAGCCCCA | 1104 | 46418584 |
| saM11 | CCCAGTGAGTACGATGGCCAGAAGAGT | 933 | cCCAGUGAGUACGAUGGCCAG | 1105 | 46418601 |
| saM12 | TCATGGCCTTTCCCCTTCTCACCGGGT | 934 | UCAUGGCCUUUCCCCUUCUCA | 1106 | 46418696 |
| saM13 | AGGCTTCTGGACTTGGCACAAGTGAGT | 933 | AGGCUUCUGGACUUGGCACAA | 1107 | 46419123 |
| saM14 | CTGCAGGTAATGTTCAGAACACCGAGT | 936 | CUGCAGGUAAUGUUCAGAACA | 1108 | 46419257 |
| saM15 | CTGTGCCTGGAGTGTTGTTCCTGGGGT | 937 | CUGUGCCUGGAGUGUUGUUCC | 1109 | 46419321 |
| saM16 | AGCTCTTTCAACACAGCCTGACAGAGT | 938 | AGCUCUUUCAACACAGCCUGA | 1110 | 46419391 |
| saM17 | AACCCAACATCTGTTAGGCTGTGGAGT | 939 | AACCCAACAUCUGUUAGGCUG | 1111 | 46419474 |
| saM18 | AACATCTGTTAGGCTGTGGAGTTGAAT | 940 | AACAUCUGUUAGGCUGUGGAG | 1112 | 46419479 |
| saM19 | GCCCACTTTCCAAATGAGATAATGGGT | 941 | GCCCACUUUCCAAAUGAGAUA | 1113 | 46419498 |
| saM20 | CCTGGAGTCCCAGCTATACTCGGGAGT | 942 | CCUGGAGUCCCAGCUAUACUC | 1114 | 46419968 |
| saM21 | ACTTGTTGAAGGCTGATCATTATGGGT | 943 | ACUUGUUGAAGGCUGAUCAUU | 1115 | 46420211 |
| saM22 | AGTAAGTTTAGAGTTGAGCGTGTGGGT | 944 | AGUAAGUUUAGAGUUGAGCGU | 1116 | 46420247 |
| saM23 | AGCAGAAACAGCCAGAGCTCTTGGGAT | 943 | AGCAGAAACAGCCAGAGCUCU | 1117 | 46420537 |
| saM24 | AGAGGTCCAGTGCTCAGATTTGTGGAT | 946 | AGAGGUCCAGUGCUCAGAUUU | 1118 | 46420584 |
| saM25 | ATCCAAGTCACCCATAAACCTATGGAT | 947 | AUCCAAGUCACCCAUAAACCU | 1119 | 46420627 |
| saM26 | ATCCATAGGTTTATGGGTGACTTGGAT | 948 | AUCCAUAGGUUUAUGGGUGAC | 1120 | 46420619 |
| saM27 | CCTTAACAGACAGACACATAACCGAGT | 949 | CCUUAACAGACAGACACAUAA | 1121 | 46420687 |
| saM28 | TCGGTTATGTGTCTGTCTGTTAAGGGT | 950 | UCGGUUAUGUGUCUGUCUGUU | 1122 | 46420677 |
| saM29 | CAAGTTTCCTACACATAGATTTGGGGT | 951 | CAAGUUUCCUACACAUAGAUU | 1123 | 46420780 |
| saM30 | CCTCAGGAAGGTGAAGCCACTTGGGAT | 952 | CCUCAGGAAGGUGAAGCCACU | 1124 | 46420821 |
| saM31 | CAGCATGGTGCCTGGTACTCAGTGGGT | 933 | CAGCAUGGUGCCUGGUACUCA | 1125 | 46420870 |
| saM32 | CACTGAGTACCAGGCACCATGCTGGGT | 954 | CACUGAGUACCAGGCACCAUG | 1126 | 46420859 |
| saM33 | TGGGTACCCAGAGAAGGCTTGTTGAAT | 933 | UGGGUACCCAGAGAAGGCUUG | 1127 | 46420892 |
| saM34 | CAAGCCTTCTCTGGGTACCCACTGAGT | 956 | CAAGCCUUCUCUGGGUACCCA | 1128 | 46420878 |
| saM35 | GCTCCATTCAACAAGCCTTCTCTGGGT | 957 | GCUCCAUUCAACAAGCCUUCU | 1129 | 46420889 |
| saM36 | GAAGGCTTGTTGAATGGAGCAATGGGT | 958 | GAAGGCUUGUUGAAUGGAGCA | 1130 | 46420904 |
| saM37 | AAGTAATCAGAATGGACCAAAATGGGT | 959 | AAGUAAUCAGAAUGGACCAAA | 1131 | 46420939 |
| saM38 | ACAATAAATGTGAAAGGAGCAAAGGGT | 960 | ACAAUAAAUGUGAAAGGAGCA | 1132 | 46421008 |
| saM39 | GCTATAGGTTGAATGTAGACTGGGAAT | 961 | GCUAUAGGUUGAAUGUAGACU | 1133 | 46421359 |
| saM40 | AGACCAGGAGAAAGCTATAGGTTGAAT | 962 | AGACCAGGAGAAAGCUAUAGG | 1134 | 46421372 |
| saM41 | AAAGCAGGGACTGTGTCTTAATAGAAT | 963 | AAAGCAGGGACUGUGUCUUAA | 1135 | 46421301 |
| saM42 | AATCCAACATCCGTTAGGCTGTGGAGT | 964 | AAUCCAACAUCCGUUAGGCUG | 1136 | 46421325 |
| saM43 | TGGGTTCAACTCCACAGCCTAACGGAT | 965 | UGGGUUCAACUCCACAGCCUA | 1137 | 46421325 |
| saM44 | GCCCATTTTACAAAGGAGATAATGGGT | 966 | GCCCAUUUUACAAAGGAGAUA | 1138 | 46421347 |
| saM45 | TTGTTCAGAGAGCAACCCTCTCTGAAT | 967 | UUGUUCAGAGAGCAACCCUCU | 1139 | 46421608 |
| saM46 | GTTGCTCTCTGAACAACAATGGAGGGT | 968 | GUUGCUCUCUGAACAACAAUG | 1140 | 46421627 |
| saM47 | TTTTATTGCATGGATGGGAGGATGAAT | 969 | UUUUAUUGCAUGGAUGGGAGG | 1141 | 46421656 |
| saM48 | CCAATCAGAAATAGTCCCTGCCTGAAT | 970 | CCAAUCAGAAAUAGUCCCUGC | 1142 | 46421723 |
| saM49 | CCAGGAAACAGACATCAAATGTAGAAT | 971 | CCAGGAAACAGACAUCAAAUG | 1143 | 46421767 |
| saM50 | CATTTGATGTCTGTTTCCTGGTAGAAT | 972 | CAUUUGAUGUCUGUUUCCUGG | 1144 | 46421753 |
| saM51 | AGCAGAAGCCCTGGGTATTATGAGAAT | 973 | AGCAGAAGCCCUGGGUAUUAU | 1145 | 46421825 |
| saM52 | CACACATACACACATCTCAGGCTGGAT | 974 | CACACAUACACACAUCUCAGG | 1146 | 46421861 |
| saM53 | ACTGCATTGTCACCTGAGCCAAGGAAT | 973 | ACUGCAUUGUCACCUGAGCCA | 1147 | 46421939 |
| saM54 | CATTGTCACCTGAGCCAAGGAATGAGT | 976 | CAUUGUCACCUGAGCCAAGGA | 1148 | 46421943 |
| saM55 | AAGGAATGAGTGTGTTTCAAGGAGGGT | 977 | AAGGAAUGAGUGUGUUUCAAG | 1149 | 46421959 |
| saM56 | CAAGAGTAAATCAGCAGCATTTAGAGT | 978 | CAAGAGUAAAUCAGCAGCAUU | 1150 | 46421988 |
| saM57 | ATTTACTCTTGAGGAGATCACTGGGAT | 979 | AUUUACUCUUGAGGAGAUCAC | 1131 | 46422012 |
| saM58 | TATCATCCCAGTGATCTCCTCAAGAGT | 980 | UAUCAUCCCAGUGAUCUCCUC | 1132 | 46422008 |
| saM59 | ATAGGCACAAGCCAGACTTTGTTGGGT | 981 | AUAGGCACAAGCCAGACUUUG | 1153 | 46422042 |
| saM60 | TTAGGGAGGGTGTAAATCTGAGGGAAT | 982 | UUAGGGAGGGUGUAAAUCUGA | 1134 | 46422137 |
| saM61 | TTCTAGGGAGGGAGGCAGGAGGTGAGT | 983 | UUCUAGGGAGGGAGGCAGGAG | 1155 | 46422546 |
| saM62 | AAATGAGGTATGTGGTAACGGAAGGGT | 984 | AAAUGAGGUAUGUGGUAACGG | 1156 | 46422623 |
| saM63 | GCCTCGTGACCTCACCTTTTCCTGGGT | 983 | GCCUCGUGACCUCACCUUUUC | 1157 | 46422645 |
| saM64 | AAAAGGTGAGGTCACGAGGCCTAGAGT | 986 | AAAAGGUGAGGUCACGAGGCC | 1158 | 46422660 |
| saM65 | GAGGCCTAGAGTGCTGTGCCGTGGGAT | 987 | GAGGCCUAGAGUGCUGUGCCG | 1159 | 46422675 |
| saM66 | TGCTGTGCCGTGGGATGTGGTGCGGGT | 988 | UGCUGUGCCGUGGGAUGUGGU | 1160 | 46422686 |
| saM67 | GAGAGCTGGAGTTCATGAAGGTGGAGT | 989 | GAGAGCUGGAGUUCAUGAAGG | 1161 | 46422746 |
| saM68 | CTGGAGGCCCCAGGGAGATGACAGAGT | 990 | CUGGAGGCCCCAGGGAGAUGA | 1162 | 46422829 |
| saM69 | ATGCGAGGTCAGCAGTTGACTAAGGGT | 991 | AUGCGAGGUCAGCAGUUGACU | 1163 | 46422874 |
| saM70 | TAATGTTGAGTCTGAGTACCCGAGGGT | 992 | UAAUGUUGAGUCUGAGUACCC | 1164 | 46422913 |
| saM71 | TCAGACTCAACATTACCAACCATGAAT | 993 | UCAGACUCAACAUUACCAACC | 1165 | 46422933 |
| saM72 | TCATGGTTGGTAATGTTGAGTCTGAGT | 994 | UCAUGGUUGGUAAUGUUGAGU | 1166 | 46422923 |
| saM73 | CTGAATTCATGGTTGGTAATGTTGAGT | 993 | CUGAAUUCAUGGUUGGUAAUG | 1167 | 46422929 |
| saM74 | GCAGGTTAGGGTGGGAAGGAACTGAAT | 996 | GCAGGUUAGGGUGGGAAGGAA | 1168 | 46422950 |
| saM75 | GAAGCCAGGGCAGCAGCAGGTTAGGGT | 997 | GAAGCCAGGGCAGCAGCAGGU | 1169 | 46422965 |
| saM76 | ACTGCAAGTCACTGTACCCAGGAGAAT | 998 | ACUGCAAGUCACUGUACCCAG | 1170 | 46423015 |
| saM77 | GATGGAGGCCCCTGAGGAGAGCAGAAT | 999 | GAUGGAGGCCCCUGAGGAGAG | 1171 | 46423079 |
| saM78 | CAACTCCCCTCCACCAGCAGGGAGAGT | 1000 | CAACUCCCCUCCACCAGCAGG | 1172 | 46423197 |
| saM79 | TGACTCTCCCTGCTGGTGGAGGGGAGT | 1001 | UGACUCUCCCUGCUGGUGGAG | 1173 | 46423191 |
| saM80 | TAGACTGGGGAGGCTGGAACCCCGGAT | 1002 | UAGACUGGGGAGGCUGGAACC | 1174 | 46423227 |
| saM81 | AGCAAGGCCATGACTCTGATCCGGGGT | 1003 | AGCAAGGCCAUGACUCUGAUC | 1175 | 46423237 |
| saM82 | ATCAGAGTCATGGCCTTGCTTTGGAGT | 1004 | AUCAGAGUCAUGGCCUUGCUU | 1176 | 46423252 |
| saM83 | ATGTCCTGGCATCATCTCCCCTGGGGT | 1005 | AUGUCCUGGCAUCAUCUCCCC | 1177 | 46423312 |
| saM84 | CCTGGCATCATCTCCCCTGGGGTGGAT | 1006 | CCUGGCAUCAUCUCCCCUGGG | 1178 | 46423316 |
| saM85 | ACTGAACAGGCCATGTTTGCCTAGAGT | 1007 | ACUGAACAGGCCAUGUUUGCC | 1179 | 46423404 |
| saM86 | TGCGGAACAAAGGAGCTTTGGGAGAAT | 1008 | UGCGGAACAAAGGAGCUUUGG | 1180 | 46423461 |
| saM87 | TCCTGGGGTTCCCATTGCCTTCAGGAT | 1009 | UCCUGGGGUUCCCAUUGCCUU | 1181 | 46423478 |
| saM88 | AGTTATGGATGGGGTTGCTCCTGGGGT | 1010 | AGUUAUGGAUGGGGUUGCUCC | 1182 | 46423496 |
| saM89 | GCAACCCCATCCATAACTCCTGAGGGT | 1011 | GCAACCCCAUCCAUAACUCCU | 1183 | 46423513 |
| saM90 | TGGAGTAGGGAATCTGAGGGGTGGGAT | 1012 | UGGAGUAGGGAAUCUGAGGGG | 1184 | 46423540 |
| saM91 | GGGTGGGATCTGAGAGGTAGGATGGGT | 1013 | GGGUGGGAUCUGAGAGGUAGG | 1185 | 46423558 |
| saM92 | GATCTGAGAGGTAGGATGGGTGGGAGT | 1014 | GAUCUGAGAGGUAGGAUGGGU | 1186 | 46423564 |
| saM93 | GAGAGGTAGGATGGGTGGGAGTAGGAT | 1015 | GAGAGGUAGGAUGGGUGGGAG | 1187 | 46423569 |
| saM94 | CCTCTGCATGGCCCGGGAGATAGGGGT | 1016 | CCUCUGCAUGGCCCGGGAGAU | 1188 | 46423668 |
| saM95 | TTTGTCGCCAGGAAGTCCAGATGGGGT | 1017 | UUUGUCGCCAGGAAGUCCAGA | 1189 | 46423695 |
| saM96 | CACCCAGGGCCCGAGATGTGCGTGGGT | 1018 | CACCCAGGGCCCGAGAUGUGC | 1190 | 46423751 |
| saM97 | CACCCACGCACATCTCGGGCCCTGGGT | 1019 | CACCCACGCACAUCUCGGGCC | 1191 | 46423744 |
| saM98 | ATACTCCTGAGGAAACAGCAGCTGGAT | 1020 | AUACUCCUGAGGAAACAGCAG | 1192 | 46423800 |
| saM99 | GAATCCAGCTGCTGTTTCCTCAGGAGT | 1021 | GAAUCCAGCUGCUGUUUCCUC | 1193 | 46423794 |
| saM100 | CTTAGGTATTGCACGACCTGTGTGAAT | 1022 | CUUAGGUAUUGCACGACCUGU | 1194 | 46423817 |
| saM101 | CCAGCAGAAGTAGCATCATCAGGGAGT | 1023 | CCAGCAGAAGUAGCAUCAUCA | 1195 | 46423860 |
| saM102 | CTCCCTCCACTTCTGGGCCCTGGGGAT | 1024 | CUCCCUCCACUUCUGGGCCCU | 1196 | 46423955 |
| saM103 | GCCCAGTGACTCCGGCAGCAGGTGAGT | 1025 | GCCCAGUGACUCCGGCAGCAG | 1197 | 46424017 |
| saM104 | TCCGGCAGCAGGTGAGTCGACACGGGT | 1026 | UCCGGCAGCAGGUGAGUCGAC | 1198 | 46424027 |
| saM105 | CCGTGTCGACTCACCTGCTGCCGGAGT | 1027 | CCGUGUCGACUCACCUGCUGC | 1199 | 46424017 |
| saM106 | CCCAACAGGAGGACTACACCTCAGGAT | 1028 | CCCAACAGGAGGACUACACCU | 1200 | 46424093 |
| saM107 | CCTGAGGTGTAGTCCTCCTGTTGGGAT | 1029 | CCUGAGGUGUAGUCCUCCUGU | 1201 | 46424083 |
| saM108 | ATCTCCAGGGTCTCAAAGGCCGGGGAT | 1030 | AUCUCCAGGGUCUCAAAGGCC | 1202 | 46424224 |
| saM109 | CAAGTGCTGGGAGAACAGAGAAAGAAT | 1031 | CAAGUGCUGGGAGAACAGAGA | 1203 | 46424263 |
| saM110 | GTAACATGGGAGGTGCCCACTTAGGGT | 1032 | GUAACAUGGGAGGUGCCCACU | 1204 | 46424310 |
| saM111 | GGTAGGAGGGGACAGGTAGACTAGGGT | 1033 | GGUAGGAGGGGACAGGUAGAC | 1205 | 46424424 |
| saM112 | GCAAGTGTTTTCAGAGCTGAATGGGGT | 1034 | GCAAGUGUUUUCAGAGCUGAA | 1206 | 46424454 |
| saM113 | GCTCAGCAAGTGTTTTCAGAGCTGAAT | 1035 | GCUCAGCAAGUGUUUUCAGAG | 1207 | 46424459 |
| saM114 | GAGACAAACATAGACTGAGCCTGGGAT | 1036 | GAGACAAACAUAGACUGAGCC | 1208 | 46424709 |
| saM115 | TGGGATTTGCTGTGTGGCCTGGAGGAT | 1037 | UGGGAUUUGCUGUGUGGCCUG | 1209 | 46424730 |
| saM116 | TGGGGAGTCCAAGGCCCAGAGACGGGT | 1038 | UGGGGAGUCCAAGGCCCAGAG | 1210 | 46424755 |
| saM117 | GGGGATGGGCTCATGGTCTCTCGGGGT | 1039 | GGGGAUGGGCUCAUGGUCUCU | 1211 | 46424801 |
| saM118 | CCCTACCTCCGGGCTCCCAGACTGAGT | 1040 | CCCUACCUCCGGGCUCCCAGA | 1212 | 46424845 |
| saM119 | TGAGGTGCTGTTCCCATGCTTTGGAGT | 1041 | UGAGGUGCUGUUCCCAUGCUU | 1213 | 46424895 |
| saM120 | TGTTCCCATGCTTTGGAGTTCCTGAGT | 1042 | UGUUCCCAUGCUUUGGAGUUC | 1214 | 46424903 |
| saM121 | CTGAGTGTCCTCTGCTGTCCCCTGGAT | 1043 | CUGAGUGUCCUCUGCUGUCCC | 1215 | 46424924 |
| saM122 | CCCAATGGGCAGCTTCTCTGTCTGAGT | 1044 | CCCAAUGGGCAGCUUCUCUGU | 1216 | 46424964 |
| saM123 | CTGTCTGAGTTGCTGCAGTTGCTGAGT | 1045 | CUGUCUGAGUUGCUGCAGUUG | 1217 | 46424981 |
| saM124 | ATGAGGAGGAAGTCTGGGCTAATGGGT | 1046 | AUGAGGAGGAAGUCUGGGCUA | 1218 | 46425087 |
| saM125 | CTGGGCTAATGGGTTGCAGTGGTGAAT | 1047 | CUGGGCUAAUGGGUUGCAGUG | 1219 | 46425100 |
| saM126 | AGGCCCCATCTGTGTGCGGTGGTGGGT | 1048 | AGGCCCCAUCUGUGUGCGGUG | 1220 | 46425159 |
| saM127 | GCTGTGTGGTTATGTGCCTGGCTGGGT | 1049 | GCUGUGUGGUUAUGUGCCUGG | 1221 | 46425275 |
| saM128 | GCCTGGCTGGGTGTGCATGTGTTGGGT | 1050 | GCCUGGCUGGGUGUGCAUGUG | 1222 | 46425290 |
| saM129 | TGCATGTGTTGGGTTATTGGTTGGAGT | 1051 | UGCAUGUGUUGGGUUAUUGGU | 1223 | 46425303 |
| saM130 | ATCTAGCTATGTGTGGCTGGTGTGGGT | 1052 | AUCUAGCUAUGUGUGGCUGGU | 1224 | 46425336 |
| saM131 | CTATGTGTGGCTGGTGTGGGTCTGAAT | 1053 | CUAUGUGUGGCUGGUGUGGGU | 1225 | 46425342 |
| saM132 | TGTGGGTCTGAATGTCTGGTAGAGAGT | 1054 | UGUGGGUCUGAAUGUCUGGUA | 1226 | 46425356 |
| saM133 | GGGCATCTGGTTGGTGAACATGTGGAT | 1055 | GGGCAUCUGGUUGGUGAACAU | 1227 | 46425438 |
| saM134 | GGTATATGTCTGGATGGCTGGAGGAGT | 1056 | GGUAUAUGUCUGGAUGGCUGG | 1228 | 46425496 |
| saM135 | CTGGAGGAGTGGAAGAGGTTTTGGGGT | 1057 | CUGGAGGAGUGGAAGAGGUUU | 1229 | 46425513 |
| saM136 | CAATGGGAGGCTGGAGACACCATGAGT | 1058 | CAAUGGGAGGCUGGAGACACC | 1230 | 46425538 |
| saM137 | CGAGGTTGTCACTGGCAGAGAGAGGGT | 1059 | CGAGGUUGUCACUGGCAGAGA | 1231 | 46425651 |
| saM138 | GAATTTGTTTGCTGAGCCTGTGAGGGT | 1060 | GAAUUUGUUUGCUGAGCCUGU | 1232 | 46425736 |
| saM139 | CAGCAAACAAATTCAATTCTGCTGAGT | 1061 | CAGCAAACAAAUUCAAUUCUG | 1233 | 46425757 |
| saM140 | ATTTTACTAAACTCAGCAGAATTGAAT | 1062 | AUUUUACUAAACUCAGCAGAA | 1234 | 46425759 |
| saM141 | GGGAAATTTTACTAAACTCAGCAGAAT | 1063 | GGGAAAUUUUACUAAACUCAG | 1235 | 46425764 |
| saM142 | TGAGTTTAGTAAAATTTCCCAGGGAAT | 1064 | UGAGUUUAGUAAAAUUUCCCA | 1236 | 46425779 |
| saM143 | GGGGACACATTCATTATAAAGATGAAT | 1065 | GGGGACACAUUCAUUAUAAAG | 1237 | 46425836 |
| saM144 | GGGGTCAGATTCATCTTTATAATGAAT | 1066 | GGGGUCAGAUUCAUCUUUAUA | 1238 | 46425836 |
| saM145 | CTATGCAGGGCAGCAGCACGGCAGAGT | 1067 | CUAUGCAGGGCAGCAGCACGG | 1239 | 46425938 |
| saM146 | ACAGAACTGGTGACTTGGCAGGAGGGT | 1068 | ACAGAACUGGUGACUUGGCAG | 1240 | 46425984 |
| saM147 | AGGGTGGCTGGTCTGTCTGGAGAGGAT | 1069 | AGGGUGGCUGGUCUGUCUGGA | 1241 | 46426006 |
| saM148 | GGAGGGCTCCCCAGACGGGTGGTGAGT | 1070 | GGAGGGCUCCCCAGACGGGUG | 1242 | 46426040 |
| saM149 | AAATAATATTCCTAGGACCCATTGGGT | 1071 | AAAUAAUAUUCCUAGGACCCA | 1243 | 46426177 |
| saM150 | TCCATTTACCCAATGGGTCCTAGGAAT | 1072 | UCCAUUUACCCAAUGGGUCCU | 1244 | 46426176 |
| saM151 | AGCAGCTGGTCCATTTACCCAATGGGT | 1073 | AGCAGCUGGUCCAUUUACCCA | 1245 | 46426185 |
| saM152 | GGTGAGCAGAGCTTCCTGGCCATGAGT | 1074 | GGUGAGCAGAGCUUCCUGGCC | 1246 | 46426234 |
| saM153 | CTAAACATTTAACCACCACATTGGAAT | 1075 | CUAAACAUUUAACCACCACAU | 1247 | 46426314 |
| saM154 | AACTAGGCTGGAGGCAGCACCCTGAGT | 1076 | AACUAGGCUGGAGGCAGCACC | 1248 | 46426694 |
| saM155 | GCACCCTGAGTACAGAGAAGGCTGGAT | 1077 | GCACCCUGAGUACAGAGAAGG | 1249 | 46426710 |
| saM156 | ACATCCAGCCTTCTCTGTACTCAGGGT | 1078 | ACAUCCAGCCUUCUCUGUACU | 1250 | 46426704 |
| saM157 | CTGTGGGATGGAGCTGGAGGGAAGGGT | 1079 | CUGUGGGAUGGAGCUGGAGGG | 1251 | 46426747 |
| saM158 | CAAAAGATGATAGCCACATCACAGGAT | 1080 | CAAAAGAUGAUAGCCACAUCA | 1252 | 46427494 |
| saM159 | TTCAAAGCGCTCCTGATACATTGGAGT | 1081 | UUCAAAGCGCUCCUGAUACAU | 1253 | 46427545 |
| saM160 | GTCACTTGCAGTCTGATTAAGGAGAGT | 1082 | GUCACUUGCAGUCUGAUUAAG | 1254 | 46427578 |
| saM161 | TTAGTGATATTGTTCCGTGGGTGGAGT | 1083 | UUAGUGAUAUUGUUCCGUGGG | 1255 | 46427618 |
| saM162 | TATTAGAAAAGCTAGAAAATTGTGAGT | 1084 | UAUUAGAAAAGCUAGAAAAUU | 1256 | 46427672 |
| saM163 | TTAAGTAATAAACATTGTTATTAGAAT | 1085 | UUAAGUAAUAAACAUUGUUAU | 1257 | 46427747 |
| saM164 | TTCTGTTGTTGGGCTGGCTGTTTGAAT | 1086 | UUCUGUUGUUGGGCUGGCUGU | 1258 | 46427824 |
| saM165 | TCATTTAAGTGTAAGTGTTTGCTGGGT | 1087 | UCAUUUAAGUGUAAGUGUUUG | 1259 | 46427968 |
| saM166 | AGAGATGAAGAAGTTAAGATACAGAGT | 1088 | AGAGAUGAAGAAGUUAAGAUA | 1260 | 46427997 |
| saM167 | TGTAAACATTTATTAACTTGTTTGAGT | 1089 | UGUAAACAUUUAUUAACUUGU | 1261 | 46428052 |
| saM168 | CTGGCAACACAGTACCCTGTAGAGGAT | 1090 | CUGGCAACACAGUACCCUGUA | 1262 | 46428291 |
| saM169 | AGGGAAACAGTGAATCCTCTACAGGGT | 1091 | AGGGAAACAGUGAAUCCUCUA | 1263 | 46428296 |
| saM170 | CACAAAATCACAAGGGAAACAGTGAAT | 1092 | CACAAAAUCACAAGGGAAACA | 1264 | 46428308 |
| saM171 | TTGCTGGCACTGTCCAGTATCGAGAAT | 1093 | UUGCUGGCACUGUCCAGUAUC | 1265 | 46428361 |
| saM172 | CTGTCCAGTATCGAGAATCAAGAGAGT | 1094 | CUGUCCAGUAUCGAGAAUCAA | 1266 | 46428370 |

* chromosomal location of guide cut-site in chromosome 1 of human enome Hg38

### Example 6: Evaluation of In Vitro Gene Editing of SpCas9 gRNA Targeting FAAH-OUT

[0571] Frequency of INDELs induced at predicted cut sites in FAAH-OUT was evaluated following in vitro treatment with complexes of SpCas9 protein and sgRNA with spacers for SpCas9 as identified in Example 5.

[0572] Specifically, SpCas9 sgRNA were prepared with spacers shown in Table 18 (SpM1-SpM185; SEQ ID NOs: 366-550) inserted into a sgRNA backbone identified by SEQ ID NO: 1267. The SpCas9 sgRNA sequences were chemically synthesized and modified by a commercial vendor.

[0573] The sgRNA were individually evaluated as complexes with SpCas9 protein for inducing INDELs at predicted cut sites in FAAH-OUT. Editing efficiency was measured in MCF7 cells. Briefly, 1×10⁵ MCF7 cells were electroporated with 0.5 μg sgRNA and 0.5 μg SpCas9 protein (SEQ ID NO: 1268), then incubated for 48-72 hours. Genomic DNA was extracted as described in Example 2, and 1 μL (30-50 ng) of genomic DNA was used for PCR amplification of regions containing predicted cut sites. The purified PCR products were then sequenced using Sanger sequencing, and cutting efficiency was analyzed by Tsunami TIDE PCR and sequencing primers corresponding to each SpCas9 sgRNA are identified in Table 21.

[0574] The guides were categorized based on cleavage efficiency as measured by INDELs introduced at the predicted cut site. As shown in Table 22, guides without detectable cleavage efficiency (frequency of INDELs not detectable above threshold of the assay), with low cleavage efficiency (total frequency of INDELs less than 15%), moderate cleavage efficiency (total frequency of INDELs 15-25%), and high cleavage efficiency (total frequency of INDELs greater than 25%) are indicated.

TABLE 21
TIDE Analysis of SpCas9 gRNAs

| | | SEQ | | SEQ | | SEQ | | SEQ |
|---|---|---|---|---|---|---|---|---|
| | PCR | ID | PCR | ID | TIDE | ID | TIDE | ID |
| sgRNA | forward | NO | reverse | NO | seq1 | NO | seq2 | NO |
| SpM1 | ccctgcccc | 1590 | ttgagcg | | CGCCCTG | 1960 | CGGTTCC | 2141 |
| | ttgttactt | | tgtgggt | | CCCCTTG | | AAGCCCC | |
| | tc | | ttcaag | | TTACTT | | CAACTT | |
| SpM2 | ccctgcccc | 1591 | ttgagcg | 1776 | CGCCCTG | 1961 | CGGTTCC | 2142 |
| | ttgttactt | | tgtgggt | | CCCCTTG | | AAGCCCC | |
| | tc | | ttcaag | | TTACTT | | CAACTT | |
| SpM3 | ccctgcccc | 1592 | ttgagcg | 1777 | NA | | NA | |
| | ttgttactt | | tgtgggt | | | | | |
| | tc | | ttcaag | | | | | |
| SpM4 | ccctgcccc | 1593 | ttgagcg | 1778 | NA | | NA | |
| | ttgttactt | | tgtgggt | | | | | |
| | tc | | ttcaag | | | | | |
| SpM5 | ccctgcccc | 1594 | ttgagcg | 1779 | NA | | NA | |
| | ttgttactt | | tgtgggt | | | | | |
| | tc | | ttcaag | | | | | |
| SpM6 | ccctgcccc | 1595 | ttgagcg | 1780 | NA | | NA | |
| | ttgttactt | | tgtgggt | | | | | |
| | tc | | ttcaag | | | | | |
| SpM7 | ccctgcccc | 1596 | ttgagcg | 1781 | CTGGGTG | 1962 | CAAAAAG | 2143 |
| | ttgttactt | | tgtgggt | | CTGGCAG | | CTGTGGC | |
| | tc | | ttcaag | | TGACAA | | AGGCCG | |
| SpM8 | ccctgcccc | 1597 | ttgagcg | 1782 | AAAGAAG | 1963 | GGCTTAG | 2144 |
| | ttgttactt | | tgtgggt | | CTGTGGC | | AGGATGG | |
| | tc | | ttcaag | | AGTGGA | | TGCTCC | |
| SpM9 | ccctgcccc | 1598 | ttgagcg | 1783 | AAAGAAG | 1964 | GGCTTAG | 2145 |
| | ttgttactt | | tgtgggt | | CTGTGGC | | AGGATGG | |
| | tc | | ttcaag | | AGTGGA | | TGCTCC | |
| SpM10 | ccctgcccc | 1599 | ttgagcg | 1784 | ACAGAAG | 1965 | AAGCGAG | 2146 |
| | ttgttactt | | tgtgggt | | GGGGACA | | GCAAAAA | |
| | tc | | ttcaag | | GAGAGT | | GCTGTG | |
| SpM11 | ccctgcccc | 1600 | ttgagcg | 1785 | TTCTGGG | 1966 | CAGCTGC | 2147 |
| | ttgttactt | | tgtgggt | | CACTTCA | | AGGGTCA | |
| | tc | | ttcaag | | CAGTCA | | GGTTAA | |
| SpM12 | ccctgcccc | 1601 | ttgagcg | 1786 | CTGTGAG | 1967 | CCACAGC | 2148 |
| | ttgttactt | | tgtgggt | | CACTGAG | | TAGAAGT | |
| | tc | | ttcaag | | GAAGGG | | TGGGGG | |
| SpM13 | ccctgcccc | 1602 | ttgagcg | 1787 | CTGTGAG | 1968 | CCACAGC | 2149 |
| | ttgttactt | | tgtgggt | | CACTGAG | | TAGAAGT | |
| | tc | | ttcaag | | GAAGGG | | TGGGGG | |
| SpM14 | ccctgcccc | 1603 | ttgagcg | 1788 | CTGTGAG | 1969 | CCACAGC | 2150 |
| | ttgttactt | | tgtgggt | | CACTGAG | | TAGAAGT | |
| | tc | | ttcaag | | GAAGGG | | TGGGGG | |
| SpM15 | ccctgcccc | 1604 | ttgagcg | 1789 | CTGTGAG | 1970 | CCACAGC | 2151 |
| | ttgttactt | | tgtgggt | | CACTGAG | | TAGAAGT | |
| | tc | | ttcaag | | GAAGGG | | TGGGGG | |
| SpM16 | ccctgcccc | 1605 | ttgagcg | 1790 | CTGTGAG | 1971 | AGCACAA | 2152 |
| | ttgttactt | | tgtgggt | | CACTGAG | | ATCAGCC | |
| | tc | | ttcaag | | GAAGGG | | TCCTCC | |
| SpM17 | ccctgcccc | 1606 | ttgagcg | 1791 | ACACAGC | 1972 | GCACAAA | 2153 |
| | ttgttactt | | tgtgggt | | CTGACAG | | TCAGCCT | |
| | tc | | ttcaag | | AGTTGG | | CCTCCT | |
| SpM18 | ccctgcccc | 1607 | ttgagcg | 1792 | ACACAGC | 1973 | GCACAAA | 2154 |
| | ttgttactt | | tgtgggt | | CTGACAG | | TCAGCCT | |
| | tc | | ttcaag | | AGTTGG | | CCTCCT | |
| SpM19 | ccctgcccc | 1608 | ttgagcg | 1793 | ACACAGC | 1974 | GCACAAA | 2155 |
| | ttgttactt | | tgtgggt | | CTGACAG | | TCAGCCT | |
| | tc | | ttcaag | | AGTTGG | | CCTCCT | |
| SpM20 | ccctgcccc | 1609 | ttgagcg | 1794 | ACACAGC | 1975 | GCACAAA | 2156 |
| | ttgttactt | | tgtgggt | | CTGACAG | | TCAGCCT | |
| | tc | | ttcaag | | AGTTGG | | CCTCCT | |
| SpM21 | ccctgcccc | 1610 | ttgagcg | 1795 | ACACAGC | 1976 | GCACAAA | 2157 |
| | ttgttactt | | tgtgggt | | CTGACAG | | TCAGCCT | |
| | tc | | ttcaag | | AGTTGG | | CCTCCT | |
| SpM22 | ccctgcccc | 1611 | ttgagcg | 1796 | ACACAGC | 1977 | GCACAAA | 2158 |
| | ttgttactt | | tgtgggt | | CTGACAG | | TCAGCCT | |
| | tc | | ttcaag | | AGTTGG | | CCTCCT | |
| SpM23 | ccctgcccc | 1612 | ttgagcg | 1797 | ACACAGC | 1978 | GCACAAA | 2159 |
| | ttgttactt | | tgtgggt | | CTGACAG | | TCAGCCT | |
| | tc | | ttcaag | | AGTTGG | | CCTCCT | |
| SpM24 | ccctgcccc | 1613 | ttgagcg | 1798 | ACACAGC | 1979 | ACCTCTC | 2160 |
| | ttgttactt | | tgtgggt | | CTGACAG | | TGACCAC | |
| | tc | | ttcaag | | AGTTGG | | CAGTGT | |
| SpM25 | ccctgcccc | 1614 | ttgagcg | 1799 | TTGCTTT | 1980 | ACTGCCT | 2161 |
| | ttgttactt | | tgtgggt | | TGACCAC | | GTTTTCA | |
| | tc | | ttcaag | | GTGCAG | | TGGCCT | |
| SpM26 | ccctgcccc | 1615 | ttgagcg | 1800 | ACACAGC | 1981 | ACCTCTC | 2162 |
| | ttgttactt | | tgtgggt | | CTGACAG | | TGACCAC | |
| | tc | | ttcaag | | AGTTGG | | CAGTGT | |
| SpM27 | ccctgcccc | 1616 | ttgagcg | 1801 | ACACAGC | 1982 | ACCTCTC | 2163 |
| | ttgttactt | | tgtgggt | | CTGACAG | | TGACCAC | |
| | tc | | ttcaag | | AGTTGG | | CAGTGT | |
| SpM28 | ccctgcccc | 1617 | ttgagcg | 1802 | ACACAGC | 1983 | ACCTCTC | 2164 |
| | ttgttactt | | tgtgggt | | CTGACAG | | TGACCAC | |
| | tc | | ttcaag | | AGTTGG | | CAGTGT | |
| SpM29 | ccctgcccc | 1618 | ttgagcg | 1803 | TTGCTTT | 1984 | ACTGCCT | 2165 |
| | ttgttactt | | tgtgggt | | TGACCAC | | GTTTTCA | |
| | tc | | ttcaag | | GTGCAG | | TGGCCT | |
| SpM30 | ccctgcccc | 1619 | ttgagcg | 1804 | GCTCCAG | 1985 | GCAGAGG | 2166 |
| | ttgttactt | | tgtgggt | | ACTGGAC | | AAGACGC | |
| | tc | | ttcaag | | ATCTCCA | | CATCTCA | |
| | | | | | AC | | AA | |
| SpM31 | ccctgcccc | 1620 | ttgagcg | 1805 | GCTCCAG | 1986 | GCAGAGG | 2167 |
| | ttgttactt | | tgtgggt | | ACTGGAC | | AAGACGC | |
| | tc | | ttcaag | | ATCTCCA | | CATCTCA | |
| | | | | | AC | | AA | |
| SpM32 | ccctgcccc | 1621 | ttgagcg | 1806 | GCTCCAG | 1987 | GCAGAGG | 2168 |
| | ttgttactt | | tgtgggt | | ACTGGAC | | AAGACGC | |
| | tc | | ttcaag | | ATCTCCA | | CATCTCA | |
| | | | | | AC | | AA | |
| SpM33 | ccctgcccc | 1622 | ttgagcg | 1807 | GCCATGA | 1988 | GCAGAGG | 2169 |
| | ttgttactt | | tgtgggt | | TTAACCT | | AAGACGC | |
| | tc | | ttcaag | | GACCCTG | | CATCTCA | |
| | | | | | CA | | AA | |
| SpM34 | ccctgcccc | 1623 | ttgagcg | 1808 | GCCATGA | 1989 | GCAGAGG | 2170 |
| | ttgttactt | | tgtgggt | | TTAACCT | | AAGACGC | |
| | tc | | ttcaag | | GACCCTG | | CATCTCA | |
| | | | | | CA | | AA | |
| SpM35 | ccctgcccc | 1624 | ttgagcg | 1809 | GCCATGA | 1990 | GCAGAGG | 2171 |
| | ttgttactt | | tgtgggt | | TTAACCT | | AAGACGC | |
| | tc | | ttcaag | | GACCCTG | | CATCTCA | |
| | | | | | CA | | AA | |
| SpM36 | ccctgcccc | 1625 | ttgagcg | 1810 | GCCATGA | 1991 | GCAGAGG | 2172 |
| | ttgttactt | | tgtgggt | | TTAACCT | | AAGACGC | |
| | tc | | ttcaag | | GACCCTG | | CATCTCA | |
| | | | | | CA | | AA | |
| SpM37 | ccctgcccc | 1626 | ttgagcg | 1811 | GCCATGA | 1992 | GCAGAGG | 2173 |
| | ttgttactt | | tgtgggt | | TTAACCT | | AAGACGC | |
| | tc | | ttcaag | | GACCCTG | | CATCTCA | |
| | | | | | CA | | AA | |
| SpM38 | ccctgcccc | 1627 | ttgagcg | 1812 | GCCATGA | 1993 | GCAGAGG | 2174 |
| | ttgttactt | | tgtgggt | | TTAACCT | | AAGACGC | |
| | tc | | ttcaag | | GACCCTG | | CATCTCA | |
| | | | | | CA | | AA | |
| SpM39 | ccctgcccc | 1628 | ttgagcg | 1813 | GCCATGA | 1994 | GCAGAGG | 2175 |
| | ttgttactt | | tgtgggt | | TTAACCT | | AAGACGC | |
| | tc | | ttcaag | | GACCCTG | | CATCTCA | |
| | | | | | CA | | AA | |
| SpM40 | ccctgcccc | 1629 | ttgagcg | 1814 | GCAGAGG | 1995 | GCTCCAG | 2176 |
| | ttgttactt | | tgtgggt | | AAGACGC | | ACTGGAC | |
| | tc | | ttcaag | | CATCTCA | | ATCTCCA | |
| | | | | | AA | | AC | |
| SpM41 | ccctgcccc | 1630 | ttgagcg | 1815 | GCAGAGG | 1996 | GCTCCAG | 2177 |
| | ttgttactt | | tgtgggt | | AAGACGC | | ACTGGAC | |
| | tc | | ttcaag | | CATCTCA | | ATCTCCA | |
| | | | | | AA | | AC | |
| SpM42 | ctcatttgg | 1631 | tcacctt | 1816 | TGTGAAA | 1997 | AGCTACC | 2178 |
| | aaagtgggc | | tcactca | | GGAGCAA | | GTGTCTG | |
| | att | | ctcccc | | AGGGTCA | | GCCCTAT | |
| | | | | | GG | | TA | |
| SpM43 | ctcatttgg | 1632 | tcacctt | 1817 | TGGGTGC | 1998 | TGAAACC | 2179 |
| | aaagtgggc | | tcactca | | TGAGCAT | | CACACGC | |
| | att | | ctcccc | | ACACAG | | TCAACT | |
| SpM44 | ctcatttgg | 1633 | tcacctt | 1818 | TGGGTGC | 1999 | TGAAACC | 2180 |
| | aaagtgggc | | tcactca | | TGAGCAT | | CACACGC | |
| | att | | ctcccc | | ACACAG | | TCAACT | |
| SpM45 | ctcatttgg | 1634 | tcacctt | 1819 | TGGGTGC | 2000 | TGAAACC | 2181 |
| | aaagtgggc | | tcactca | | TGAGCAT | | CACACGC | |
| | att | | ctcccc | | ACACAG | | TCAACT | |
| SpM46 | ctcatttgg | 1635 | tcacctt | 1820 | AAAGGAG | 2001 | TGAAACC | 2182 |
| | aaagtgggc | | tcactca | | CAAAGGG | | CACACGC | |
| | att | | ctcccc | | TCAGGG | | TCAACT | |
| SpM47 | ctcatttgg | 1636 | tcacctt | 1821 | AAAGGAG | 2002 | TGAAACC | 2183 |
| | aaagtgggc | | tcactca | | CAAAGGG | | CACACGC | |
| | att | | ctcccc | | TCAGGG | | TCAACT | |
| SpM48 | ctcatttgg | 1637 | tcacctt | 1822 | AAAGGAG | 2003 | TGAAACC | 2184 |
| | aaagtgggc | | tcactca | | CAAAGGG | | CACACGC | |
| | att | | ctcccc | | TCAGGG | | TCAACT | |
| SpM49 | ctcatttgg | 1638 | tcacctt | 1823 | AAAGGAG | 2004 | TGAAACC | 2185 |
| | aaagtgggc | | tcactca | | CAAAGGG | | CACACGC | |
| | att | | ctcccc | | TCAGGG | | TCAACT | |
| SpM50 | ctcatttgg | 1639 | tcacctt | 1824 | AAAGGAG | 2005 | TGAAACC | 2186 |
| | aaagtgggc | | tcactca | | CAAAGGG | | CACACGC | |
| | att | | ctcccc | | TCAGGG | | TCAACT | |
| SpM51 | ctcatttgg | 1640 | tcacctt | 1825 | AAAGGAG | 2006 | CATTCTT | 2187 |
| | aaagtgggc | | tcactca | | CAAAGGG | | CGGACAC | |
| | att | | ctcccc | | TCAGGG | | CAGCCT | |
| SpM52 | ctcatttgg | 1641 | tcacctt | 1826 | GGCGTGA | 2007 | ACAGCCT | 2188 |
| | aaagtgggc | | tcactca | | CCTACAC | | GAGAGAG | |
| | att | | ctcccc | | CCTTAAC | | ATGAAGG | |
| | | | | | AG | | AGT | |
| SpM53 | ctcatttgg | 1642 | tcacctt | 1827 | TTTCTCT | 2008 | CCCTGCT | 2189 |
| | aaagtgggc | | tcactca | | GGCTGGG | | TTCTACC | |
| | att | | ctcccc | | CTTAGC | | AAGTGC | |
| SpM54 | ctcatttgg | 1643 | tcacctt | 1828 | TTTCTCT | 2009 | CCCTGCT | 2190 |
| | aaagtgggc | | tcactca | | GGCTGGG | | TTCTACC | |
| | att | | ctcccc | | CTTAGC | | AAGTGC | |
| SpM55 | ctcatttgg | 1644 | tcacctt | 1829 | TTTCTCT | 2010 | CCCTGCT | 2191 |
| | aaagtgggc | | tcactca | | GGCTGGG | | TTCTACC | |
| | att | | ctcccc | | CTTAGC | | AAGTGC | |
| SpM56 | ctcatttgg | 1645 | tcacctt | 1830 | TTTCTCT | 2011 | CCCTGCT | 2192 |
| | aaagtgggc | | tcactca | | GGCTGGG | | TTCTACC | |
| | att | | ctcccc | | CTTAGC | | AAGTGC | |
| SpM57 | ctcatttgg | 1646 | tcacctt | 1831 | GGCCCTC | 2012 | ATGGGTT | 2193 |
| | aaagtgggc | | tcactca | | CCAAGTT | | CAACTCC | |
| | att | | ctcccc | | TCCTAC | | ACAGCC | |
| SpM58 | ctcatttgg | 1647 | tcacctt | 1832 | ATGGGTT | 2013 | GGCCCTC | 2194 |
| | aaagtgggc | | tcactca | | CAACTCC | | CCAAGTT | |
| | att | | ctcccc | | ACAGCC | | TCCTAC | |
| SpM59 | ctcatttgg | 1648 | tcacctt | 1833 | ATGGGTT | 2014 | GGCCCTC | 2195 |
| | aaagtgggc | | tcactca | | CAACTCC | | CCAAGTT | |
| | att | | ctcccc | | ACAGCC | | TCCTAC | |
| SpM60 | ctcatttgg | 1649 | tcacctt | 1834 | ATGGGTT | 2015 | GGCCCTC | 2196 |
| | aaagtgggc | | tcactca | | CAACTCC | | CCAAGTT | |
| | att | | ctcccc | | ACAGCC | | TCCTAC | |
| SpM61 | ctcatttgg | 1650 | tcacctt | 1835 | ATGGGTT | 2016 | GGCCCTC | 2197 |
| | aaagtgggc | | tcactca | | CAACTCC | | CCAAGTT | |
| | att | | ctcccc | | ACAGCC | | TCCTAC | |
| SpM62 | ctcatttgg | 1651 | tcacctt | 1836 | ATGGGTT | 2017 | TGTGTAT | 2198 |
| | aaagtgggc | | tcactca | | CAACTCC | | GCTCAGC | |
| | att | | ctcccc | | ACAGCC | | ACCCAG | |
| SpM63 | ctcatttgg | 1652 | tcacctt | 1837 | ATGGGTT | 2018 | TGTGTAT | 2199 |
| | aaagtgggc | | tcactca | | CAACTCC | | GCTCAGC | |
| | att | | ctcccc | | ACAGCC | | ACCCAG | |
| SpM64 | ctcatttgg | 1653 | tcacctt | 1838 | ATGGGTT | 2019 | TGTGTAT | 2200 |
| | aaagtgggc | | tcactca | | CAACTCC | | GCTCAGC | |
| | att | | ctcccc | | ACAGCC | | ACCCAG | |
| SpM65 | ctcatttgg | 1654 | tcacctt | 1839 | ATGGGTT | 2020 | TGTGTAT | 2201 |
| | aaagtgggc | | tcactca | | CAACTCC | | GCTCAGC | |
| | att | | ctcccc | | ACAGCC | | ACCCAG | |
| SpM66 | ctcatttgg | 1655 | tcacctt | 1840 | ATGGGTT | 2021 | TGTGTAT | 2202 |
| | aaagtgggc | | tcactca | | CAACTCC | | GCTCAGC | |
| | att | | ctcccc | | ACAGCC | | ACCCAG | |
| SpM67 | ctcatttgg | 1656 | tcacctt | 1841 | TGGAAGC | 2022 | CCCTGAC | 2203 |
| | aaagtgggc | | tcactca | | TCCATTC | | CCTTTGC | |
| | att | | ctcccc | | AGGCAG | | TCCTTT | |
| SpM68 | ctcatttgg | 1657 | tcacctt | 1842 | TGGAAGC | 2023 | CCCTGAC | 2204 |
| | aaagtgggc | | tcactca | | TCCATTC | | CCTTTGC | |
| | att | | ctcccc | | AGGCAG | | TCCTTT | |
| SpM69 | ctcatttgg | 1658 | tcacctt | 1843 | TGCACTT | 2024 | AGTTTTC | 2205 |
| | aaagtgggc | | tcactca | | GGTAGAA | | TACACGG | |
| | att | | ctcccc | | AGCAGGG | | GCTGCCT | |
| | | | | | AC | | TT | |
| SpM70 | ctcatttgg | 1659 | tcacctt | 1844 | TGCACTT | 2025 | ACGTCTT | 2206 |
| | aaagtgggc | | tcactca | | GGTAGAA | | TTGTCCG | |
| | att | | ctcccc | | AGCAGGG | | CTTCCTG | |
| | | | | | AC | | AA | |
| SpM71 | ctcatttgg | 1660 | tcacctt | 1845 | GGCTGTG | 2026 | GCGTTGC | 2207 |
| | aaagtgggc | | tcactca | | GAGTTGA | | TGCTAGC | |
| | att | | ctcccc | | ACCCAT | | TCTTTC | |
| SpM72 | ctcatttgg | 1661 | tcacctt | 1846 | GGCTGTG | 2027 | GCGTTGC | 2208 |
| | aaagtgggc | | tcactca | | GAGTTGA | | TGCTAGC | |
| | att | | ctcccc | | ACCCAT | | TCTTTC | |
| SpM73 | ctcatttgg | 1662 | tcacctt | 1847 | GGCTGTG | 2028 | GCGTTGC | 2209 |
| | aaagtgggc | | tcactca | | GAGTTGA | | TGCTAGC | |
| | att | | ctcccc | | ACCCAT | | TCTTTC | |
| SpM74 | gaccctttg | 1663 | gctcctt | 1848 | GGCTGTG | 2029 | GCGTTGC | 2210 |
| | ctcctttca | | tgttccg | | GAGTTGA | | TGCTAGC | |
| | ca | | cataag | | ACCCAT | | TCTTTC | |
| SpM75 | gaccctttg | 1664 | gctcctt | 1849 | GGCTGTG | 2030 | TGAGCCC | 2211 |
| | ctcctttca | | tgttccg | | GAGTTGA | | TCCATTC | |
| | ca | | cataag | | ACCCAT | | CTACCT | |
| SpM76 | gaccctttg | 1665 | gctcctt | 1850 | GGCTGTG | 2031 | TGAGCCC | 2212 |
| | ctcctttca | | tgttccg | | GAGTTGA | | TCCATTC | |
| | ca | | cataag | | ACCCAT | | CTACCT | |
| SpM77 | gaccctttg | 1666 | gctcctt | 1851 | GCGTTGC | 2032 | GCACTTG | 2213 |
| | ctcctttca | | tgttccg | | TGCTAGC | | GTAGAAA | |
| | ca | | cataag | | TCTTTC | | GCAGGG | |
| SpM78 | gaccctttg | 1667 | gctcctt | 1852 | GCGTTGC | 2033 | GGCTGTG | 2214 |
| | ctcctttca | | tgttccg | | TGCTAGC | | GAGTTGA | |
| | ca | | cataag | | TCTTTC | | ACCCAT | |
| SpM79 | gaccctttg | 1668 | gctcctt | 1853 | GCGTTGC | 2034 | GGCTGTG | 2215 |
| | ctcctttca | | tgttccg | | TGCTAGC | | GAGTTGA | |
| | ca | | cataag | | TCTTTC | | ACCCAT | |
| SpM80 | gaccctttg | 1669 | gctcctt | 1854 | GCGTTGC | 2035 | GGCTGTG | 2216 |
| | ctcctttca | | tgttccg | | TGCTAGC | | GAGTTGA | |
| | ca | | cataag | | TCTTTC | | ACCCAT | |
| SpM81 | gaccctttg | 1670 | gctcctt | 1855 | TGGGGGA | 2036 | TCCCTCC | 2217 |
| | ctcctttca | | tgttccg | | GCATAGA | | ATTCATC | |
| | ca | | cataag | | CCTTGT | | CTCCCA | |
| SpM82 | gaccctttg | 1671 | gctcctt | 1856 | TGGGGGA | 2037 | TCCCTCC | 2218 |
| | ctcctttca | | tgttccg | | GCATAGA | | ATTCATC | |
| | ca | | cataag | | CCTTGT | | CTCCCA | |
| SpM83 | gaccctttg | 1672 | gctcctt | 1857 | TGGGGGA | 2038 | TCCCTCC | 2219 |
| | ctcctttca | | tgttccg | | GCATAGA | | ATTCATC | |
| | ca | | cataag | | CCTTGT | | CTCCCA | |
| SpM84 | gaccctttg | 1673 | gctcctt | 1858 | TGGGGGA | 2039 | TCCCTCC | 2220 |
| | ctcctttca | | tgttccg | | GCATAGA | | ATTCATC | |
| | ca | | cataag | | CCTTGT | | CTCCCA | |
| SpM85 | gaccctttg | 1674 | gctcctt | 1859 | CCTGAAG | 2040 | AGGAAGC | 2221 |
| | ctcctttca | | tgttccg | | TTGCCCA | | GGACAAA | |
| | ca | | cataag | | CTCTGT | | AGACGT | |
| SpM86 | gaccctttg | 1675 | gctcctt | 1860 | CCTGAAG | 2041 | AGGAAGC | 2222 |
| | ctcctttca | | tgttccg | | TTGCCCA | | GGACAAA | |
| | ca | | cataag | | CTCTGT | | AGACGT | |
| SpM87 | gaccctttg | 1676 | gctcctt | 1861 | CCTGAAG | 2042 | AGGAAGC | 2223 |
| | ctcctttca | | tgttccg | | TTGCCCA | | GGACAAA | |
| | ca | | cataag | | CTCTGT | | AGACGT | |
| SpM88 | gaccctttg | 1677 | gctcctt | 1862 | CCTGAAG | 2043 | AGGAAGC | 2224 |
| | ctcctttca | | tgttccg | | TTGCCCA | | GGACAAA | |
| | ca | | cataag | | CTCTGT | | AGACGT | |
| SpM89 | gaccctttg | 1678 | gctcctt | 1863 | CCTGAAG | 2044 | AGGAAGC | 2225 |
| | ctcctttca | | tgttccg | | TTGCCCA | | GGACAAA | |
| | ca | | cataag | | CTCTGT | | AGACGT | |
| SpM90 | gaccctttg | 1679 | gctcctt | 1864 | CCTGAAG | 2045 | AGGAAGC | 2226 |
| | ctcctttca | | tgttccg | | TTGCCCA | | GGACAAA | |
| | ca | | cataag | | CTCTGT | | AGACGT | |
| SpM91 | gaccctttg | 1680 | gctcctt | 1865 | CCTGAAG | 2046 | AGGAAGC | 2227 |
| | ctcctttca | | tgttccg | | TTGCCCA | | GGACAAA | |
| | ca | | cataag | | CTCTGT | | AGACGT | |
| SpM92 | gaccctttg | 1681 | gctcctt | 1866 | TGAGTCT | 2047 | GAAAGAG | 2228 |
| | ctcctttca | | tgttccg | | GAGTACC | | CTAGCAG | |
| | ca | | cataag | | CGAGGG | | CAACGC | |
| SpM93 | gaccctttg | 1682 | gctcctt | 1867 | TGAGTCT | 2048 | GAAAGAG | 2229 |
| | ctcctttca | | tgttccg | | GAGTACC | | CTAGCAG | |
| | ca | | cataag | | CGAGGG | | CAACGC | |
| SpM94 | gaccctttg | 1683 | gctcctt | 1868 | CCTGAAG | 2049 | AGGAAGC | 2230 |
| | ctcctttca | | tgttccg | | TTGCCCA | | GGACAAA | |
| | ca | | cataag | | CTCTGT | | AGACGT | |
| SpM95 | gaccctttg | 1684 | gctcctt | 1869 | TGAGTCT | 2050 | GAAAGAG | 2231 |
| | ctcctttca | | tgttccg | | GAGTACC | | CTAGCAG | |
| | ca | | cataag | | CGAGGG | | CAACGC | |
| SpM96 | gaccctttg | 1685 | gctcctt | 1870 | TGAGTCT | 2051 | GAAAGAG | 2232 |
| | ctcctttca | | tgttccg | | GAGTACC | | CTAGCAG | |
| | ca | | cataag | | CGAGGG | | CAACGC | |
| SpM97 | gaccctttg | 1686 | gctcctt | 1871 | TGAGTCT | 2052 | GAAAGAG | 2233 |
| | ctcctttca | | tgttccg | | GAGTACC | | CTAGCAG | |
| | ca | | cataag | | CGAGGG | | CAACGC | |
| SpM98 | gaccctttg | 1687 | gctcctt | 1872 | TGAGTCT | 2053 | GAAAGAG | 2234 |
| | ctcctttca | | tgttccg | | GAGTACC | | CTAGCAG | |
| | ca | | cataag | | CGAGGG | | CAACGC | |
| SpM99 | gaccctttg | 1688 | gctcctt | 1873 | TGGAAAA | 2054 | ACAAGGT | 2235 |
| | ctcctttca | | tgttccg | | GTGGTGC | | CTATGCT | |
| | ca | | cataag | | AGAGGG | | CCCCCA | |
| SpM100 | gaccctttg | 1689 | gctcctt | 1874 | TGGAAAA | 2055 | ACAAGGT | 2236 |
| | ctcctttca | | tgttccg | | GTGGTGC | | CTATGCT | |
| | ca | | cataag | | AGAGGG | | CCCCCA | |
| SpM101 | gagagotgg | 1690 | catgttc | 1875 | GGGCCAT | 2056 | CCAGCTC | 2237 |
| | agttcatga | | accaacc | | CAATCAC | | TGTGTGT | |
| | agg | | agatgc | | CATCCA | | GGTTGT | |
| SpM102 | gagagotgg | 1691 | catgttc | 1876 | GGGCCAT | 2057 | CCAGCTC | 2238 |
| | agttcatga | | accaacc | | CAATCAC | | TGTGTGT | |
| | agg | | agatgc | | CATCCA | | GGTTGT | |
| SpM103 | gagagctgg | 1692 | catgttc | 1877 | GGGCCAT | 2058 | CCAGCTC | 2239 |
| | agttcatga | | accaacc | | CAATCAC | | TGTGTGT | |
| | agg | | agatgc | | CATCCA | | GGTTGT | |
| SpM104 | gagagotgg | 1693 | catgttc | 1878 | CAGCAAC | 2059 | GCACGTG | 2240 |
| | agttcatga | | accaacc | | TGCAGCA | | GCTCAGT | |
| | agg | | agatgc | | ACTCAG | | AACATG | |
| SpM105 | gagagotgg | 1694 | catgttc | 1879 | CAGCAAC | 2060 | ACGTGGC | 2241 |
| | agttcatga | | accaacc | | TGCAGCA | | TCAGTAA | |
| | agg | | agatgc | | ACTCAG | | CATGGG | |
| SpM106 | gagagotgg | 1695 | catgttc | 1880 | CAGCAAC | 2061 | ACGTGGC | 2242 |
| | agttcatga | | accaacc | | TGCAGCA | | TCAGTAA | |
| | agg | | agatgc | | ACTCAG | | CATGGG | |
| SpM107 | gagagotgg | 1696 | catgttc | 1881 | CAGCAAC | 2062 | ACGTGGC | 2243 |
| | agttcatga | | accaacc | | TGCAGCA | | TCAGTAA | |
| | agg | | agatgc | | ACTCAG | | CATGGG | |
| SpM108 | gagagatgg | 1697 | catgttc | 1882 | CAGCAAC | 2063 | ACGTGGC | 2244 |
| | agttcatga | | accaacc | | TGCAGCA | | TCAGTAA | |
| | agg | | agatgc | | ACTCAG | | CATGGG | |
| SpM109 | gagagatgg | 1698 | catgttc | 1883 | CAGCAAC | 2064 | ACGTGGC | 2245 |
| | agttcatga | | accaacc | | TGCAGCA | | TCAGTAA | |
| | agg | | agatgc | | ACTCAG | | CATGGG | |
| SpM110 | gagagctgg | 1699 | catgttc | 1884 | CAGCAAC | 2065 | ACGTGGC | 2246 |
| | agttcatga | | accaacc | | TGCAGCA | | TCAGTAA | |
| | agg | | agatgc | | ACTCAG | | CATGGG | |
| SpM111 | gagagctgg | 1700 | catgttc | 1885 | GCAACCC | 2066 | GAGCACT | 2247 |
| | agttcatga | | accaacc | | ATTAGCC | | CCAAAAT | |
| | agg | | agatgc | | CAGACT | | CCCCCA | |
| SpM112 | gagagctgg | 1701 | catgttc | 1886 | GCAACCC | 2067 | GAGCACT | 2248 |
| | agttcatga | | accaacc | | ATTAGCC | | CCAAAAT | |
| | agg | | agatgc | | CAGACT | | CCCCCA | |
| SpM113 | gagagctgg | 1702 | catgttc | 1887 | GCAACCC | 2068 | GAGCACT | 2249 |
| | agttcatga | | accaacc | | ATTAGCC | | CCAAAAT | |
| | agg | | agatgc | | CAGACT | | CCCCCA | |
| SpM114 | gagagctgg | 1703 | catgttc | 1888 | GCAACCC | 2069 | GAGCACT | 2250 |
| | agttcatga | | accaacc | | ATTAGCC | | CCAAAAT | |
| | agg | | agatgc | | CAGACT | | CCCCCA | |
| SpM115 | gagagctgg | 1704 | catgttc | 1889 | GCAACCC | 2070 | GAGCACT | 2251 |
| | agttcatga | | accaacc | | ATTAGCC | | CCAAAAT | |
| | agg | | agatgc | | CAGACT | | CCCCCA | |
| SpM116 | gagagctgg | 1705 | catgttc | 1890 | AGCCAGA | 2071 | CAGGAAG | 2252 |
| | agttcatga | | accaacc | | CCAGACA | | CTGCAGG | |
| | agg | | agatgc | | CACAAC | | TCTTCA | |
| SpM117 | gagagctgg | 1706 | catgttc | 1891 | AGCCAGA | 2072 | CAGGAAG | 2253 |
| | agttcatga | | accaacc | | CCAGACA | | CTGCAGG | |
| | agg | | agatgc | | CACAAC | | TCTTCA | |
| SpM118 | gagagctgg | 1707 | catgttc | 1892 | AGCCAGA | 2073 | CAGGAAG | 2254 |
| | agttcatga | | accaacc | | CCAGACA | | CTGCAGG | |
| | agg | | agatgc | | CACAAC | | TCTTCA | |
| SpM119 | gagagctgg | 1708 | catgttc | 1893 | AGCCAGA | 2074 | CAGGAAG | 2255 |
| | agttcatga | | accaacc | | CCAGACA | | CTGCAGG | |
| | agg | | agatgc | | CACAAC | | TCTTCA | |
| SpM120 | gagagctgg | 1709 | catgttc | 1894 | AGCCAGA | 2075 | CAGGAAG | 2256 |
| | agttcatga | | accaacc | | CCAGACA | | CTGCAGG | |
| | agg | | agatgc | | CACAAC | | TCTTCA | |
| SpM121 | gagagctgg | 1710 | catgttc | 1895 | AGCCAGA | 2076 | CAGGAAG | 2257 |
| | agttcatga | | accaacc | | CCAGACA | | CTGCAGG | |
| | agg | | agatgc | | CACAAC | | TCTTCA | |
| SpM122 | gagagctgg | 1711 | catgttc | 1896 | AGCCAGA | 2077 | CAGGAAG | 2258 |
| | agttcatga | | accaacc | | CCAGACA | | CTGCAGG | |
| | agg | | agatgc | | CACAAC | | TCTTCA | |
| SpM123 | gagagctgg | 1712 | catgttc | 1897 | AGCCAGA | 2078 | CAGGAAG | 2259 |
| | agttcatga | | accaacc | | CCAGACA | | CTGCAGG | |
| | agg | | agatgc | | CACAAC | | TCTTCA | |
| SpM124 | ggtgctgtt | 1713 | caggagc | 1898 | CAGCCCA | 2079 | GGGAAGG | 2260 |
| | cccatgctt | | gctttga | | GACATCC | | AGGGACA | |
| | tg | | aagaca | | ACATGT | | TGGAGA | |
| SpM125 | ggtgctgtt | 1714 | caggagc | 1899 | CAGCCCA | 2080 | GGGAAGG | 2261 |
| | cccatgctt | | gctttga | | GACATCC | | AGGGACA | |
| | tg | | aagaca | | ACATGT | | TGGAGA | |
| SpM126 | ggtgctgtt | 1715 | caggagc | 1900 | CAGCCCA | 2081 | GACTGAG | 2262 |
| | cccatgctt | | gctttga | | GACATCC | | CCTGGGA | |
| | tg | | aagaca | | ACATGT | | TTTGCT | |
| SpM127 | ggtgctgtt | 1716 | caggagc | 1901 | CAGCCCA | 2082 | GACTGAG | 2263 |
| | cccatgctt | | gctttga | | GACATCC | | CCTGGGA | |
| | tg | | aagaca | | ACATGT | | TTTGCT | |
| SpM128 | ggtgctgtt | 1717 | caggagc | 1902 | CAGCCCA | 2083 | GACTGAG | 2264 |
| | cccatgctt | | gctttga | | GACATCC | | CCTGGGA | |
| | tg | | aagaca | | ACATGT | | TTTGCT | |
| SpM129 | ggtgctgtt | 1718 | caggagc | 1903 | CAGCCCA | 2084 | GACTGAG | 2265 |
| | cccatgctt | | gctttga | | GACATCC | | CCTGGGA | |
| | tg | | aagaca | | ACATGT | | TTTGCT | |
| SpM130 | ggtgctgtt | 1719 | caggagc | 1904 | CAGCCCA | 2085 | GATGGGC | 2266 |
| | cccatgctt | | gctttga | | GACATCC | | TCATGGT | |
| | tg | | aagaca | | ACATGT | | CTCTCG | |
| SpM131 | ggtgctgtt | 1720 | caggagc | 1905 | CAGCCCA | 2086 | GATGGGC | 2267 |
| | cccatgctt | | gctttga | | GACATCC | | TCATGGT | |
| | tg | | aagaca | | ACATGT | | CTCTCG | |
| SpM132 | ggtgctgtt | 1721 | caggagc | 1906 | CAGCCCA | 2087 | GATGGGC | 2268 |
| | cccatgctt | | gctttga | | GACATCC | | TCATGGT | |
| | tg | | aagaca | | ACATGT | | CTCTCG | |
| SpM133 | ggtgctgtt | 1722 | caggagc | 1907 | CAGCCCA | 2088 | GATGGGC | 2269 |
| | cccatgctt | | gctttga | | GACATCC | | TCATGGT | |
| | tg | | aagaca | | ACATGT | | CTCTCG | |
| SpM134 | ggtgctgtt | 1723 | caggagc | 1908 | CAGCCCA | 2089 | GATGGGC | 2270 |
| | cccatgctt | | gctttga | | GACATCC | | TCATGGT | |
| | tg | | aagaca | | ACATGT | | CTCTCG | |
| SpM135 | ggtgctgtt | 1724 | caggagc | 1909 | CAGCCCA | 2090 | GATGGGC | 2271 |
| | cccatgctt | | gctttga | | GACATCC | | TCATGGT | |
| | tg | | aagaca | | ACATGT | | CTCTCG | |
| SpM136 | ggtgctgtt | 1725 | caggagc | 1910 | ACAGCCC | 2091 | GATGGGC | 2272 |
| | cccatgctt | | gctttga | | AGACATC | | TCATGGT | |
| | tg | | aagaca | | CACATG | | CTCTCG | |
| SpM137 | ggtgctgtt | 1726 | caggagc | 1911 | CAAGGTG | 2092 | GTGCTGT | 2273 |
| | cccatgctt | | gctttga | | CTGAGAG | | TCCCATG | |
| | tg | | aagaca | | CCAAGA | | CTTTGG | |
| SpM138 | ggtgctgtt | 1727 | caggagc | 1912 | CAAGGTG | 2093 | GTGCTGT | 2274 |
| | cccatgctt | | gctttga | | CTGAGAG | | TCCCATG | |
| | tg | | aagaca | | CCAAGA | | CTTTGG | |
| SpM139 | ggtgctgtt | 1728 | caggagc | 1913 | CAAGGTG | 2094 | GTGCTGT | 2275 |
| | cccatgctt | | gctttga | | CTGAGAG | | TCCCATG | |
| | tg | | aagaca | | CCAAGA | | CTTTGG | |
| SpM140 | ggtgctgtt | 1729 | caggagc | 1914 | CAAGGTG | 2095 | GTGCTGT | 2276 |
| | cccatgctt | | gctttga | | CTGAGAG | | TCCCATG | |
| | tg | | aagaca | | CCAAGA | | CTTTGG | |
| SpM141 | ggtgctgtt | 1730 | caggagc | 1915 | CAAGGTG | 2096 | GTGCTGT | 2277 |
| | cccatgctt | | gctttga | | CTGAGAG | | TCCCATG | |
| | tg | | aagaca | | CCAAGA | | CTTTGG | |
| SpM142 | ggtgctgtt | 1731 | caggagc | 1916 | CAAGGTG | 2097 | GTGCTGT | 2278 |
| | cccatgctt | | gctttga | | CTGAGAG | | TCCCATG | |
| | tg | | aagaca | | CCAAGA | | CTTTGG | |
| SpM143 | ggtgctgtt | 1732 | caggagc | 1917 | CAAGGTG | 2098 | GTGCTGT | 2279 |
| | cccatgctt | | gctttga | | CTGAGAG | | TCCCATG | |
| | tg | | aagaca | | CCAAGA | | CTTTGG | |
| SpM144 | ggtgctgtt | 1733 | caggagc | 1918 | CAAGGTG | 2099 | GTGCTGT | 2280 |
| | cccatgctt | | gctttga | | CTGAGAG | | TCCCATG | |
| | tg | | aagaca | | CCAAGA | | CTTTGG | |
| SpM145 | ggtgctgtt | 1734 | caggagc | 1919 | CAAGGTG | 2100 | GTGCTGT | 2281 |
| | cccatgctt | | gctttga | | CTGAGAG | | TCCCATG | |
| | tg | | aagaca | | CCAAGA | | CTTTGG | |
| SpM146 | ggtgctgtt | 1735 | caggagc | 1920 | CAAGGTG | 2101 | GTGCTGT | 2282 |
| | cccatgctt | | gctttga | | CTGAGAG | | TCCCATG | |
| | tg | | aagaca | | CCAAGA | | CTTTGG | |
| SpM147 | ggtgctgtt | 1736 | caggagc | 1921 | CAAGGTG | 2102 | GTGCTGT | 2283 |
| | cccatgctt | | gctttga | | CTGAGAG | | TCCCATG | |
| | tg | | aagaca | | CCAAGA | | CTTTGG | |
| SpM148 | ggtgctgtt | 1737 | caggagc | 1922 | GGTCTCG | 2103 | CTGAGTT | 2284 |
| | cccatgctt | | gctttga | | AGGTTGT | | GCTGCAG | |
| | tg | | aagaca | | CACTGG | | TTGCTG | |
| SpM149 | ggtgctgtt | 1738 | caggagc | 1923 | GGTCTCG | 2104 | AGTCTGG | 2285 |
| | cccatgctt | | gctttga | | AGGTTGT | | GCTAATG | |
| | tg | | aagaca | | CACTGG | | GGTTGC | |
| SpM150 | ggtgctgtt | 1739 | caggagc | 1924 | CCCGGGA | 2105 | AGTCTGG | 2286 |
| | cccatgctt | | gctttga | | CATAAAG | | GCTAATG | |
| | tg | | aagaca | | GTGGAC | | GGTTGC | |
| SpM151 | ggtgctgtt | 1740 | caggagc | 1925 | CCCGGGA | 2106 | AGTCTGG | 2287 |
| | cccatgctt | | gctttga | | CATAAAG | | GCTAATG | |
| | tg | | aagaca | | GTGGAC | | GGTTGC | |
| SpM152 | ggtgctgtt | 1741 | caggagc | 1926 | AGTGTGA | 2107 | AGTCTGG | 2288 |
| | cccatgctt | | gctttga | | GTCAGGG | | GCTAATG | |
| | tg | | aagaca | | GTCAGA | | GGTTGC | |
| SpM153 | ggtgctgtt | 1742 | caggagc | 1927 | AGTGTGA | 2108 | AGTCTGG | 2289 |
| | cccatgctt | | gctttga | | GTCAGGG | | GCTAATG | |
| | tg | | aagaca | | GTCAGA | | GGTTGC | |
| SpM154 | ggtgctgtt | 1743 | caggagc | 1928 | AGTGTGA | 2109 | AGTCTGG | 2290 |
| | cccatgctt | | gctttga | | GTCAGGG | | GCTAATG | |
| | tg | | aagaca | | GTCAGA | | GGTTGC | |
| SpM155 | ggtgctgtt | 1744 | caggagc | 1929 | AGTGTGA | 2110 | AGTCTGG | 2291 |
| | cccatgctt | | gctttga | | GTCAGGG | | GCTAATG | |
| | tg | | aagaca | | GTCAGA | | GGTTGC | |
| SpM156 | ggtgctgtt | 1745 | caggagc | 1930 | AGTGTGA | 2111 | AGTCTGG | 2292 |
| | cccatgctt | | gctttga | | GTCAGGG | | GCTAATG | |
| | tg | | aagaca | | GTCAGA | | GGTTGC | |
| SpM157 | ggtgctgtt | 1746 | caggagc | 1931 | TCACCAG | 2112 | CCTGCTT | 2293 |
| | cccatgctt | | gctttga | | TTCTGTG | | TCTTGTG | |
| | tg | | aagaca | | GGCATC | | CCTCCT | |
| SpM158 | ggtgctgtt | 1747 | caggagc | 1932 | TCACCAG | 2113 | CCTGCTT | 2294 |
| | cccatgctt | | gctttga | | TTCTGTG | | TCTTGTG | |
| | tg | | aagaca | | GGCATC | | CCTCCT | |
| SpM159 | ggtgctgtt | 1748 | caggagc | 1933 | TCACCAG | 2114 | GTTGTGT | 2295 |
| | cccatgctt | | gctttga | | TTCTGTG | | GTCTGGT | |
| | tg | | aagaca | | GGCATC | | CTGGCT | |
| SpM160 | ggtgctgtt | 1749 | caggagc | 1934 | TCACCAG | 2115 | GTTGTGT | 2296 |
| | cccatgctt | | gctttga | | TTCTGTG | | GTCTGGT | |
| | tg | | aagaca | | GGCATC | | CTGGCT | |
| SpM161 | ggtgctgtt | 1750 | caggagc | 1935 | TCACCAG | 2116 | GTTGTGT | 2297 |
| | cccatgctt | | gctttga | | TTCTGTG | | GTCTGGT | |
| | tg | | aagaca | | GGCATC | | CTGGCT | |
| SpM162 | ggtgctgtt | 1751 | caggagc | 1936 | GCCATGA | 2117 | TGTGTGT | 2298 |
| | cccatgctt | | gctttga | | GGTTCAG | | CTGATGT | |
| | tg | | aagaca | | CTCACT | | GTGGGG | |
| SpM163 | ggtgctgtt | 1752 | caggagc | 1937 | AGCAGCT | 2118 | CATGTGG | 2299 |
| | cccatgctt | | gctttga | | GGTCCAT | | ATGTCTG | |
| | tg | | aagaca | | TTACCC | | GGCTGT | |
| SpM164 | ggtgctgtt | 1753 | caggagc | 1938 | AGCAGCT | 2119 | CATGTGG | 2300 |
| | cccatgctt | | gctttga | | GGTCCAT | | ATGTCTG | |
| | tg | | aagaca | | TTACCC | | GGCTGT | |
| SpM165 | ggtgctgtt | 1754 | caggagc | 1939 | AGCAGCT | 2120 | CATGTGG | 2301 |
| | cccatgctt | | gctttga | | GGTCCAT | | ATGTCTG | |
| | tg | | aagaca | | TTACCC | | GGCTGT | |
| SpM166 | ggtgctgtt | 1755 | caggagc | 1940 | AGCAGCT | 2121 | TCTTGGC | 2302 |
| | cccatgctt | | gctttga | | GGTCCAT | | TCTCAGC | |
| | tg | | aagaca | | TTACCC | | ACCTTG | |
| SpM167 | ggtgctgtt | 1756 | caggagc | 1941 | AGCAGCT | 2122 | TCTTGGC | 2303 |
| | cccatgctt | | gctttga | | GGTCCAT | | TCTCAGC | |
| | tg | | aagaca | | TTACCC | | ACCTTG | |
| SpM168 | ggtgctgtt | 1757 | caggagc | 1942 | GGCCATG | 2123 | TCTTGGC | 2304 |
| | cccatgctt | | gctttga | | AGTAGCT | | TCTCAGC | |
| | tg | | aagaca | | TGAGCA | | ACCTTG | |
| SpM169 | ggtgctgtt | 1758 | caggagc | 1943 | GGCCATG | 2124 | TCTTGGC | 2305 |
| | cccatgctt | | gctttga | | AGTAGCT | | TCTCAGC | |
| | tg | | aagaca | | TGAGCA | | ACCTTG | |
| SpM170 | ggtgctgtt | 1759 | caggagc | 1944 | GGCCATG | 2125 | TCTTGGC | 2306 |
| | cccatgctt | | gctttga | | AGTAGCT | | TCTCAGC | |
| | tg | | aagaca | | TGAGCA | | ACCTTG | |
| SpM171 | ggtgctgtt | 1760 | caggagc | 1945 | GAGGTGA | 2126 | TCTTGGC | 2307 |
| | cccatgctt | | gctttga | | GCAGAGC | | TCTCAGC | |
| | tg | | aagaca | | TTCCTG | | ACCTTG | |
| SpM172 | ggtgctgtt | 1761 | caggagc | 1946 | TTAGTTG | 2127 | CTTTATG | 2308 |
| | cccatgctt | | gctttga | | GGCTTGG | | TCCCGGG | |
| | tg | | aagaca | | TGGGAC | | GAGGTG | |
| SpM173 | ggtgctgtt | 1762 | caggagc | 1947 | TTAGTTG | 2128 | CTTTATG | 2309 |
| | cccatgctt | | gctttga | | GGCTTGG | | TCCCGGG | |
| | tg | | aagaca | | TGGGAC | | GAGGTG | |
| SpM174 | ggtgctgtt | 1763 | caggagc | 1948 | TTAGTTG | 2129 | CTTTATG | 2310 |
| | cccatgctt | | gctttga | | GGCTTGG | | TCCCGGG | |
| | tg | | aagaca | | TGGGAC | | GAGGTG | |
| SpM175 | ggtgctgtt | 1764 | caggagc | 1949 | TTAGTTG | 2130 | CTTTATG | 2311 |
| | cccatgctt | | gctttga | | GGCTTGG | | TCCCGGG | |
| | tg | | aagaca | | TGGGAC | | GAGGTG | |
| SpM176 | ggtgctgtt | 1765 | caggagc | 1950 | TTAGTTG | 2131 | CTTTATG | 2312 |
| | cccatgctt | | gctttga | | GGCTTGG | | TCCCGGG | |
| | tg | | aagaca | | TGGGAC | | GAGGTG | |
| SpM177 | ggtgctgtt | 1766 | caggagc | 1951 | TTAGTTG | 2132 | CTTTATG | 2313 |
| | cccatgctt | | gctttga | | GGCTTGG | | TCCCGGG | |
| | tg | | aagaca | | TGGGAC | | GAGGTG | |
| SpM178 | ggtgctgtt | 1767 | caggagc | 1952 | TTAGTTG | 2133 | GTCAAAC | 2314 |
| | cccatgctt | | gctttga | | GGCTTGG | | CCTCACA | |
| | tg | | aagaca | | TGGGAC | | GGCTCA | |
| SpM179 | ggtgctgtt | 1768 | caggagc | 1953 | TTAGTTG | 2134 | GTCAAAC | 2315 |
| | cccatgctt | | gctttga | | GGCTTGG | | CCTCACA | |
| | tg | | aagaca | | TGGGAC | | GGCTCA | |
| SpM180 | ggtgctgtt | 1769 | caggagc | 1954 | TTAGTTG | 2135 | GTCAAAC | 2316 |
| | cccatgctt | | gctttga | | GGCTTGG | | CCTCACA | |
| | tg | | aagaca | | TGGGAC | | GGCTCA | |
| SpM181 | ctggaggga | 1770 | cccagtc | 1955 | ATTGTTC | 2136 | CAGTGCC | 2317 |
| | agggttagc | | agccaca | | CGTGGGT | | AGCAAGA | |
| | tc | | aaatca | | GGAGTC | | CTAGCT | |
| SpM182 | ctggaggga | 1771 | cccagtc | 1956 | ATTGTTC | 2137 | CAGTGCC | 2318 |
| | agggttagc | | agccaca | | CGTGGGT | | AGCAAGA | |
| | tc | | aaatca | | GGAGTC | | CTAGCT | |
| SpM183 | ctggaggga | 1772 | cccagtc | 1957 | TGTTTGC | 2138 | TGCGCCT | 2319 |
| | agggttagc | | agccaca | | TGTGTAC | | GGCTAAT | |
| | tc | | aaatca | | CAGGCA | | TTGTTG | |
| SpM184 | ctggaggga | 1773 | cccagtc | 1958 | TGTTTGC | 2139 | TGCGCCT | 2320 |
| | agggttagc | | agccaca | | TGTGTAC | | GGCTAAT | |
| | tc | | aaatca | | CAGGCA | | TTGTTG | |
| SpM185 | ctggaggga | 1774 | cccagtc | 1959 | CAGGTGA | 2140 | TCCCTGT | 2321 |
| | agggttagc | | agccaca | | TTTTGCC | | CTTTCAA | |
| | tc | | aaatca | | CAACCG | | AGCGCT | |

TABLE 22
SpCas9 sgRNAs Categorized Based on Cleavage Efficiency

| Total INDEL % | Guides |
|---|---|
| Not detectable | SpM2, SpM3, SpM4, SpM5, SpM6, SpM8, SpM14, SpM28, SpM64, |
| above assay | SpM69, SpM70, SpM83, SpM84, SpM102, SpM105, SpM116, SpM129, |
| threshold of | SpM132, SpM133, SpM134, SpM135, SpM136, SpM141, SpM143, |
| detection | SpM145, SpM146, SpM147, SpM149, SpM150, SpM151, SpM152, |
| | SpM174, SpM176 |
| <15% | SpM1, SpM7, SpM10, SpM11, SpM12, SpM15, SpM17, SpM18, |
| | SpM19, SpM20, SpM21, SpM22, SpM23, SpM25, SpM26, SpM27, |
| | SpM29, SpM30, SpM31, SpM32, SpM33, SpM34, SpM35, SpM36, |
| | SpM37, SpM38, SpM39, SpM42, SpM43, SpM44, SpM45, SpM46, |
| | SpM47, SpM48, SpM49, SpM50, SpM51, SpM52, SpM54, SpM57, |
| | SpM58, SpM59, SpM61, SpM62, SpM63, SpM65, SpM66, SpM67, |
| | SpM68, SpM71, SpM72, SpM73, SpM74, SpM75, SpM76, SpM77, |
| | SpM78, SpM81, SpM82, SpM85, SpM86, SpM87, SpM88, SpM89, |
| | SpM90, SpM91, SpM92, SpM94, SpM95, SpM96, SpM97, SpM98 |
| | SpM101, SpM103, SpM104, SpM106, SpM107, SpM108, SpM109, |
| | SpM111, SpM114, SpM117, SpM119, SpM120, SpM121, SpM123, |
| | SpM125, SpM127, SpM128, SpM131, SpM142, SpM144, SpM148, |
| | SpM153, SpM159, SpM163, SpM166, SpM180, SpM182, SpM183, |
| | SpM184 |
| 15%-25% | SpM24, SpM53, SpM55, SpM79, SpM93, SpM99, SpM112, SpM130, |
| | SpM138, SpM140, SpM157, SpM158, SpM162, SpM165, SpM170, |
| | SpM181 |
| >25% | SpM9, SpM13, SpM16, SpM40, SpM41, SpM56, SpM60, SpM80, |
| | SpM100, SpM110, SpM113, SpM115, SpM118, SpM122, SpM124, |
| | SpM126, SpM137, SpM139, SpM154, SpM155, SpM156, SpM160, |
| | SpM161, SpM164, SpM167, SpM168, SpM169, SpM171, SpM172, |
| | SpM173, SpM175, SpM177, SpM178, SpM179, SpM185 |

[0575] A subset of the SpCas9 sgRNAs was selected for inducing a microdeletion in FAAH-OUT. Specifically, 4 left guides (SpM9, SpM13, SpM41, and SpM56) and 9 right guides (SpM110, SpM122, SpM126, SpM137, SpM168, SpM169, SpM173, SpM175, and SpM185) with high overall INDEL frequency were selected and re-evaluated for editing efficiency. The selected SpCas9 sgRNAs and corresponding frequency of INDELs at predicted cut-sites are identified in Table 23.

TABLE 23
Left and Right SpCas9 sgRNAs Targeting FAAH-OUT

| sgRNA Name | Indel % | L/R* |
|---|---|---|
| SpM41 | 82.7 | L |
| SpM169 | 82.7 | R |
| SpM110 | 75.4 | R |
| SpM185 | 75.3 | R |
| SpM173 | 70 | R |
| SpM126 | 68.5 | R |
| SpM9 | 67.3 | L |
| SpM168 | 66 | R |
| SpM122 | 62.7 | R |
| SpM137 | 61.75 | R |
| SpM56 | 60.2 | L |
| SpM13 | 56.9 | L |
| SpM175 | 53.7 | R |

*denotes Left (L) or Right (R) gRNA

[0576] Combinations of SpCas9 sgRNAs identified in Table 23 were evaluated for inducing a microdeletion in FAAH-OUT. Specifically, the sgRNA combinations identified in Table 24 were evaluated. Briefly, 0.3×10⁶MCF7 cells were electroporated with a left and right sgRNA (0.8 μg per each) and 1.5 μg SpCas9 protein (1.5 ug) for 48-72 hours. Cells were harvested for genomic DNA extraction, which was eluted in 30 ul DNA elution buffer (TE0.1). DNA concentration was measured by Dropsense (Trinean). 1 ul genomic DNA (˜30-60 ng) was used for droplet digital PCR (ddPCR) using the Bio-Rad QX200 ddPCR System (Bio-Rad, ddPCR™ Supermix for Probes (No dUTP) #1863024) to measure the genome deletion induced by the sgRNA pairs. A region of FAAH-OUT within the PT microdeletion (i.e., proximal to FOC) was amplified using the following primers:

(SEQ ID NO: 1276)
forward primer: CATAGACTGAGCCTGGGATTTG;

[0577] reverse primer: CAAAGCATGGGAACAGCACC (SEQ ID NO: 1277); and detected using

[0578] probe: AGGATGTGACAACCCGTCTC (SEQ ID NO: 1278). Primers corresponding to a genomic region outside the PT microdeletion (i.e., approximately 300 nt upstream FAAH) were used as a sample reference control:

reference forward primer:
(SEQ ID NO: 1279)
CCCAGTGACTAGTGTTCAGC;
reference reverse primer:
(SEQ ID NO: 1280)
CTTTCGCTCGACATCCACTG;

[0579] and detected using

reference probe:
(SEQ ID NO: 1281)
CTGGATCAGGAGCACAGTAGAC.

[0580] Deletion within FAAH-OUT was quantified based on the number of target sequence (TS) reads in the PT microdeletion relative to reference sequence (RS) reads outside the PT microdeletion, with % deletion equivalent to 100×(1-TS/RS). As shown in FIG. 5A, the majority of sgRNA pairs evaluated resulted in frequency of genomic deletion within FAAH-OUT that exceeded 40%. Quantification of deletion for each sgRNA combination is provided in Table 24.

[0581] The combinations of sgRNAs were further evaluated for effect on FAAH mRNA and protein expression. Briefly, MCF7 cells were electroporated with the combination sgRNAs as described above. Following 48-72 hours, the cells were harvested. Either RNA was extracted for quantification of FAAH mRNA by qPCR, or protein was extracted for quantification of FAAH protein by Simple Wes, each as described in Example 2.

[0582] As shown in FIG. 5B, the FAAH mRNA levels in treated cells, measured as fold change relative to control cells electroporated with SpCas9 only using the 2\hat{ }(−ddCt) method, were reduced by 20% or more for most of the sgRNA combinations tested. Quantification of fold change is provided in Table 24.

[0583] As shown in FIG. 5C, the FAAH protein levels were also evaluated, with FAAH-protein normalized to GAPDH levels then calculated as fold change for treated cells relative to PBS control cells. FAAH protein levels were significantly reduced for most of the sgRNA combinations tested. Quantification of fold change in FAAH protein between treated and control samples is provided in Table 24.

TABLE 24
SpCas9 Left and Right sgRNAs Targeting FAAH-OUT

| | | FAAH mRNA | FAAH protein |
|---|---|---|---|
| gRNA pair ID | Deletion (%) | (fold change) | (fold change) |
| 2-SpM9/110 | 70.78 | 0.68144 | 0.7274 |
| 3-SpM9/122 | 41.05 | 0.66836 | 0.5333 |
| 4-SpM9/126 | 53.23 | 0.70454 | 0.7339 |
| 5-SpM9/137 | 38.68 | 0.69484 | 0.6805 |
| 6-SpM9/168 | 39.67 | 0.70398 | 0.6969 |
| 7-SpM9/169 | 47.35 | 0.63096 | 0.7057 |
| 8-SpM9/173 | 45.13 | 0.65793 | 0.7473 |
| 9-SpM9/175 | 46.26 | 0.60404 | 0.6781 |
| 10-SpM9/185 | 14.65 | 0.60327 | 0.7537 |
| 12-SpM13/110 | 68.81 | 0.84196 | 0.624 |
| 13-SpM13/122 | 46.77 | 0.9163 | 0.5825 |
| 14-SpM13/126 | 45.36 | 0.82587 | 0.7175 |
| 15-SpM13/137 | 44.41 | 0.77515 | 0.7603 |
| 16-SpM13/168 | 37.74 | 0.85882 | NA |
| 17-SpM13/169 | 42.8 | 0.75423 | 0.7203 |
| 18-SpM13/173 | 38.66 | 0.78534 | 0.6519 |
| 19-SpM13/175 | 42 | 0.79203 | 0.6502 |
| 20-SpM13/185 | 18.36 | 1.01604 | 0.7542 |
| 22-SpM41/110 | 67.21 | 0.72344 | 0.6741 |
| 23-SpM41/122 | 38.32 | 0.66861 | 0.6911 |
| 24-SpM41/126 | 43.78 | 0.74379 | 0.7566 |
| 25-SpM41/137 | 36.41 | 0.84673 | 0.6581 |
| 26-SpM41/168 | 30.96 | 0.66892 | 0.6365 |
| 27-SpM41/169 | 43.24 | 0.77428 | 0.5119 |
| 28-SpM41/173 | 42.16 | 0.73828 | 0.7072 |
| 29-SpM41/175 | 41.04 | 0.81009 | 0.6525 |
| 30-SpM41/185 | 11.44 | 0.93321 | 0.8963 |
| 32-SpM56/110 | 73.41 | 0.65477 | 0.7675 |
| 33-SpM56/122 | 44.5 | 0.86968 | 0.7977 |
| 34-SpM56/126 | 52.01 | 0.80454 | 0.7626 |
| 35-SpM56/137 | 42.5 | 0.88465 | 0.91 |
| 36-SpM56/168 | 42.86 | 0.85496 | 0.9078 |
| 37-SpM56/169 | 47.97 | 0.83236 | 0.6972 |
| 38-SpM56/173 | 45.67 | 0.8633 | 0.7459 |
| 39-SpM56/175 | 48.48 | 0.69011 | 0.9765 |
| 40-SpM56/185 | 21.83 | 0.8715 | 0.9026 |

### Example 7: Evaluation of In Vitro Gene Editing of SluCas9 gRNA Targeting FAAH-OUT

[0584] Frequency of INDELs induced at predicted cut sites in FAAH-OUT was evaluated following in vitro treatment with complexes of SluCas9 protein and sgRNA with spacers for SluCas9 as identified in Example 5.

[0585] Specifically, SluCas9 sgRNA were prepared with spacers shown in Table 19 (SluM1-SluM186; SEQ ID NOs: 737-922) inserted into a sgRNA backbone identified by SEQ ID NO: 1269. The SluCas9 sgRNA sequences were chemically synthesized by a commercial vendor (Agilent).

[0586] The sgRNA were individually evaluated as complexes with SluCas9 protein for inducing INDELs at predicted cut sites in FAAH-OUT. Editing efficiency was measured in MCF7 cells. Briefly, 1×10⁵ MCF7 cells were electroporated with 0.7 μg sgRNA and 0.5 μg SluCas9 protein (SEQ ID NO: 1270), then incubated for 48-72 hours. Genomic DNA was extracted as described in Example 2, and 1 μL (30-50 ng) of genomic DNA was used for PCR amplification of regions containing predicted cut sites. The purified PCR products were then sequenced using Sanger sequencing, and cutting efficiency was analyzed by Tsunami TIDE PCR and sequencing primers corresponding to each SluCas9 sgRNA are identified in Table 25.

[0587] The guides were categorized based on cleavage efficiency as measured by INDELs introduced at the predicted cut site. As shown in Table 26, guides without detectable cleavage efficiency (frequency of INDELs not detectable above threshold of the assay), with low cleavage efficiency (total frequency of INDELs less than 15%), moderate cleavage efficiency (total frequency of INDELs 15-25%), and high cleavage efficiency (total frequency of INDELs greater than 25%) are indicated.

TABLE 25
TIDE Analysis of SluCas9 gRNAs

| | | SEQ | | SEQ | | SEQ | | SEQ |
|---|---|---|---|---|---|---|---|---|
| | | ID | | ID | | ID | | ID |
| sgRNA | PCR forward | NO | PCR reverse | NO | TIDE seq1 | NO | TIDE seq2 | NO |
| SluM1 | ccctgccccuguactuc | 2322 | ttgagcgtgtg | 2508 | GGAGGAGGCTGAT | 2694 | CAGGATCTTGG | 2880 |
| | | | ggtttcaag | | TTGTGCT | | CTCACTGCA | |
| SluM2 | ccctgccccuguactuc | 2323 | ttgagcgtgtg | 2509 | GGAGGAGGCTGAT | 2695 | CAGGATCTTGG | 2881 |
| | | | ggtttcaag | | TTGTGCT | | CTCACTGCA | |
| SluM3 | ccctgccccttgttactt | 2324 | ttgagcgtgtg | 2510 | GGAGGAGGCTGAT | 2696 | CAGGATCTTGG | 2882 |
| | tc | | ggtttcaag | | TTGTGCT | | CTCACTGCA | |
| SluM4 | ccctgccccttgttactt | 2325 | ttgagcgtgtg | 2511 | GGAGGAGGCTGAT | 2697 | CAGGATCTTGG | 2883 |
| | tc | | ggtttcaag | | TTGTGCT | | CTCACTGCA | |
| SluM5 | ccctgccccttgttactt | 2326 | ttgagcgtgtg | 2512 | GGTGCTGGCAGTGA | 2698 | AAGCGAGGCA | 2884 |
| | tc | | ggtttcaag | | CAAATG | | AAAAGCTGTG | |
| SluM6 | ccctgccccttgttactt | 2327 | ttgagcgtgtg | 2513 | GGTGCTGGCAGTGA | 2699 | AAGCGAGGCA | 2885 |
| | tc | | ggtttcaag | | CAAATG | | AAAAGCTGTG | |
| SluM7 | ccctgccccttgttactt | 2328 | ttgagcgtgtg | 2514 | GGAGGAGGCTGAT | 2700 | CCTGGCCACCC | 2886 |
| | tc | | ggtttcaag | | TTGTGCT | | TTTGTTCTT | |
| SluM8 | ccctgccccttgttactt | 2329 | ttgagcgtgtg | 2515 | AAAGAAGCTGTGG | 2701 | GGCTTAGAGGA | 2887 |
| | tc | | ggtttcaag | | CAGTGGA | | TGGTGCTCC | |
| SluM9 | ccctgccccttgttactt | 2330 | ttgagcgtgtg | 2516 | ACAGAAGGGGGAC | 2702 | AAGCGAGGCA | 2888 |
| | tc | | ggtttcaag | | AGAGAGT | | AAAAGCTGTG | |
| SluM10 | ccctgccccttgttactt | 2331 | ttgagcgtgtg | 2517 | TTCTGGGCACTTCA | 2703 | CAGCTGCAGGG | 2889 |
| | tc | | ggatcaag | | CAGTCA | | TCAGGTTAA | |
| sluMll | ccctgccccttgttactt | 2332 | ttgagcgtgtg | 2518 | TTCTGGGCACTTCA | 2704 | CAGCTGCAGGG | 2890 |
| | tc | | ggatcaag | | CAGTCA | | TCAGGTTAA | |
| SluM12 | ccctgccccttgttactt | 2333 | ttgagcgtgtg | 2519 | CTGTGAGCACTGAG | 2705 | CCACAGCTAGA | 2891 |
| | tc | | ggatcaag | | GAAGGG | | AGTTGGGGG | |
| SluM13 | ccctgccccttgttactt | 2334 | ttgagcgtgtg | 2520 | CTGTGAGCACTGAG | 2706 | CCACAGCTAGA | 2892 |
| | tc | | ggatcaag | | GAAGGG | | AGTTGGGGG | |
| SluM14 | ccctgccccttgttactt | 2335 | ttgagcgtgtg | 2521 | CTGTGAGCACTGAG | 2707 | CCACAGCTAGA | 2893 |
| | tc | | ggatcaag | | GAAGGG | | AGTTGGGGG | |
| SluM15 | ccctgccccttgttactt | 2336 | ttgagcgtgtg | 2522 | CTGTGAGCACTGAG | 2708 | CCACAGCTAGA | 2894 |
| | tc | | ggatcaag | | GAAGGG | | AGTTGGGGG | |
| SluM16 | ccctgccccttgttactt | 2337 | ttgagcgtgtg | 2523 | CTGTGAGCACTGAG | 2709 | CCACAGCTAGA | 2895 |
| | tc | | ggatcaag | | GAAGGG | | AGTTGGGGG | |
| SluM17 | ccctgccccttgttactt | 2338 | ttgagcgtgtg | 2524 | CTGTGAGCACTGAG | 2710 | CCACAGCTAGA | 2896 |
| | tc | | ggatcaag | | GAAGGG | | AGTTGGGGG | |
| SluM18 | ccctgccccttgttactt | 2339 | ttgagcgtgtg | 2525 | CTGTGAGCACTGAG | 2711 | CCACAGCTAGA | 2897 |
| | tc | | ggatcaag | | GAAGGG | | AGTTGGGGG | |
| SluM19 | ccctgccccttgttactt | 2340 | ttgagcgtgtg | 2526 | CTGTGAGCACTGAG | 2712 | CCACAGCTAGA | 2898 |
| | tc | | ggatcaag | | GAAGGG | | AGTTGGGGG | |
| SluM20 | ccctgccccttgttactt | 2341 | ttgagcgtgtg | 2527 | ACACAGCCTGACA | 2713 | GCACAAATCAG | 2899 |
| | tc | | ggatcaag | | GAGTTGG | | CCTCCTCCT | |
| SluM21 | ccctgccccttgttactt | 2342 | ttgagcgtgtg | 2528 | ACACAGCCTGACA | 2714 | GCACAAATCAG | 2900 |
| | tc | | ggatcaag | | GAGTTGG | | CCTCCTCCT | |
| SluM22 | ccctgccccttgttactt | 2343 | ttgagcgtgtg | 2529 | ACACAGCCTGACA | 2715 | GCACAAATCAG | 2901 |
| | tc | | ggatcaag | | GAGTTGG | | CCTCCTCCT | |
| SluM23 | ccctgccccttgttactt | 2344 | ttgagcgtgtg | 2530 | ACACAGCCTGACA | 2716 | GCACAAATCAG | 2902 |
| | tc | | ggatcaag | | GAGTTGG | | CCTCCTCCT | |
| SluM24 | ccctgccccttgttactt | 2345 | ttgagcgtgtg | 2531 | ACACAGCCTGACA | 2717 | GCACAAATCAG | 2903 |
| | tc | | ggatcaag | | GAGTTGG | | CCTCCTCCT | |
| SluM25 | ccctgccccttgttactt | 2346 | ttgagcgtgtg | 2532 | ACACAGCCTGACA | 2718 | GCACAAATCAG | 2904 |
| | tc | | ggatcaag | | GAGTTGG | | CCTCCTCCT | |
| SluM26 | ccctgccccttgttactt | 2347 | ttgagcgtgtg | 2533 | ACACAGCCTGACA | 2719 | GCACAAATCAG | 2905 |
| | tc | | ggatcaag | | GAGTTGG | | CCTCCTCCT | |
| SluM27 | ccctgccccttgttactt | 2348 | ttgagcgtgtg | 2534 | ACACAGCCTGACA | 2720 | ACCTCTCTGAC | 2906 |
| | tc | | ggatcaag | | GAGTTGG | | CACCAGTGT | |
| SluM28 | ccctgccccttgttactt | 2349 | ttgagcgtgtg | 2535 | ACACAGCCTGACA | 2721 | GCACAAATCAG | 2907 |
| | tc | | ggatcaag | | GAGTTGG | | CCTCCTCCT | |
| SluM29 | ccctgccccttgttactt | 2350 | ttgagcgtgtg | 2536 | ACACAGCCTGACA | 2722 | ACCTCTCTGAC | 2908 |
| | tc | | ggatcaag | | GAGTTGG | | CACCAGTGT | |
| SluM30 | ccctgccccttgttactt | 2351 | ttgagcgtgtg | 2537 | ACACAGCCTGACA | 2723 | ACCTCTCTGAC | 2909 |
| | tc | | ggatcaag | | GAGTTGG | | CACCAGTGT | |
| SluM31 | ccctgccccttgttactt | 2352 | ttgagcgtgtg | 2538 | TTGCTTTTGACCAC | 2724 | ACTGCCTGTTT | 2910 |
| | tc | | ggatcaag | | GTGCAG | | TCATGGCCT | |
| SluM32 | ccctgccccttgttactt | 2353 | ttgagcgtgtg | 2539 | ACACAGCCTGACA | 2725 | ACCTCTCTGAC | 2911 |
| | tc | | ggatcaag | | GAGTTGG | | CACCAGTGT | |
| SluM33 | ccctgccccttgttactt | 2354 | ttgagcgtgtg | 2540 | ACACAGCCTGACA | 2726 | ACCTCTCTGAC | 2912 |
| | tc | | ggatcaag | | GAGTTGG | | CACCAGTGT | |
| SluM34 | ccctgccccttgttactt | 2355 | ttgagcgtgtg | 2541 | TTGCTTTTGACCAC | 2727 | ACTGCCTGTTT | 2913 |
| | tc | | ggatcaag | | GTGCAG | | TCATGGCCT | |
| SluM35 | ccctgccccttgttactt | 2356 | ttgagcgtgtg | 2542 | TTGCTTTTGACCAC | 2728 | ACTGCCTGTTT | 2914 |
| | tc | | ggatcaag | | GTGCAG | | TCATGGCCT | |
| SluM36 | ccctgccccttgttactt | 2357 | ttgagcgtgtg | 2543 | TTGCTTTTGACCAC | 2729 | TCCACTGCCAC | 2915 |
| | tc | | ggatcaag | | GTGCAG | | AGCTTCTTT | |
| SluM37 | ccctgccccttgttactt | 2358 | ttgagcgtgtg | 2544 | TTGCTTTTGACCAC | 2730 | TCCACTGCCAC | 2916 |
| | tc | | ggatcaag | | GTGCAG | | AGCTTCTTT | |
| SluM38 | ccctgccccttgttactt | 2359 | ttgagcgtgtg | 2545 | CACAGCTTTTTGCC | 2731 | GCAGAGGAAG | 2917 |
| | tc | | ggatcaag | | TCGCTT | | ACGCCATCTC | |
| SluM39 | ccctgccccttgttactt | 2360 | ttgagcgtgtg | 2546 | CACAGCTTTTTGCC | 2732 | GCAGAGGAAG | 2918 |
| | tc | | ggatcaag | | TCGCTT | | ACGCCATCTC | |
| SluM40 | ccctgccccttgttactt | 2361 | ttgagcgtgtg | 2547 | CACAGCTTTTTGCC | 2733 | GCAGAGGAAG | 2919 |
| | tc | | ggatcaag | | TCGCTT | | ACGCCATCTC | |
| SluM41 | ccctgccccttgttactt | 2362 | ttgagcgtgtg | 2548 | CACAGCTTTTTGCC | 2734 | GCAGAGGAAG | 2920 |
| | tc | | ggatcaag | | TCGCTT | | ACGCCATCTC | |
| SluM42 | ccctgccccttgttactt | 2363 | ttgagcgtgtg | 2549 | CACAGCTTTTTGCC | 2735 | GCAGAGGAAG | 2921 |
| | tc | | ggatcaag | | TCGCTT | | ACGCCATCTC | |
| SluM43 | ccctgccccttgttactt | 2364 | ttgagcgtgtg | 2550 | CACAGCTTTTTGCC | 2736 | GCAGAGGAAG | 2922 |
| | tc | | ggatcaag | | TCGCTT | | ACGCCATCTC | |
| SluM44 | ccctgccccttgttactt | 2365 | ttgagcgtgtg | 2551 | TTAACCTGACCCTG | 2737 | GCAGAGGAAG | 2923 |
| | tc | | ggatcaag | | CAGCTG | | ACGCCATCTC | |
| SluM45 | ccctgccccttgttactt | 2366 | ttgagcgtgtg | 2552 | TTAACCTGACCCTG | 2738 | GCAGAGGAAG | 2924 |
| | tc | | ggatcaag | | CAGCTG | | ACGCCATCTC | |
| SluM46 | ccctgccccttgttactt | 2367 | ttgagcgtgtg | 2553 | CACAGCTTTTTGCC | 2739 | GCAGAGGAAG | 2925 |
| | tc | | ggatcaag | | TCGCTT | | ACGCCATCTC | |
| SluM47 | ccctgccccttgttactt | 2368 | ttgagcgtgtg | 2554 | CACAGCTTTTTGCC | 2740 | GCAGAGGAAG | 2926 |
| | tc | | ggatcaag | | TCGCTT | | ACGCCATCTC | |
| SluM48 | ccctgccccttgttactt | 2369 | ttgagcgtgtg | 2555 | CACAGCTTTTTGCC | 2741 | GCAGAGGAAG | 2927 |
| | tc | | ggatcaag | | TCGCTT | | ACGCCATCTC | |
| SluM49 | ccctgccccttgttactt | 2370 | ttgagcgtgtg | 2556 | CAAAACATAGCCG | 2742 | CACAGCTTTTT | 2928 |
| | tc | | ggatcaag | | GGCACAG | | GCCTCGCTT | |
| SluM50 | ccctgccccttgttactt | 2371 | ttgagcgtgtg | 2557 | CAAAACATAGCCG | 2743 | CACAGCTTTTT | 2929 |
| | tc | | ggatcaag | | GGCACAG | | GCCTCGCTT | |
| SluM51 | ccctgccccttgttactt | 2372 | ttgagcgtgtg | 2558 | CAAAACATAGCCG | 2744 | CACAGCTTTTT | 2930 |
| | tc | | ggatcaag | | GGCACAG | | GCCTCGCTT | |
| SluM52 | ccctgccccttgttactt | 2373 | ttgagcgtgtg | 2559 | CAAAACATAGCCG | 2745 | CACAGCTTTTT | 2931 |
| | tc | | ggatcaag | | GGCACAG | | GCCTCGCTT | |
| SluM53 | gaccctttgctcctttca | 2374 | gctcctttgtt | 2560 | TGGGGGAGCATAG | 2746 | TCCCTCCATTC | 2932 |
| | ca | | ccgcataag | | ACCTTGT | | ATCCTCCCA | |
| SluM54 | gaccctttgctcctttca | 2375 | gctcctttgtt | 2561 | TGGGGGAGCATAG | 2747 | TCCCTCCATTC | 2933 |
| | ca | | ccgcataag | | ACCTTGT | | ATCCTCCCA | |
| SluM55 | gaccctttgctcctttca | 2376 | gctcctttgtt | 2562 | TGGGGGAGCATAG | 2748 | TCCCTCCATTC | 2934 |
| | ca | | ccgcataag | | ACCTTGT | | ATCCTCCCA | |
| SluM56 | gaccctttgctcctttca | 2377 | gctcctttgtt | 2563 | TGGGGGAGCATAG | 2749 | TCCCTCCATTC | 2935 |
| | ca | | ccgcataag | | ACCTTGT | | ATCCTCCCA | |
| SluM57 | gaccctttgctcctttca | 2378 | gctcctttgtt | 2564 | TGGGGGAGCATAG | 2750 | TCCCTCCATTC | 2936 |
| | ca | | ccgcataag | | ACCTTGT | | ATCCTCCCA | |
| SluM58 | gaccctttgctcctttca | 2379 | gctcctttgtt | 2565 | TTGGGCGGATCAAT | 2751 | CCTGCCTGAAT | 2937 |
| | ca | | ccgcataag | | TGAGCT | | GGAGCTTCC | |
| SluM59 | gaccctttgctcctttca | 2380 | gctcctttgtt | 2566 | TTGGGCGGATCAAT | 2752 | CCTGCCTGAAT | 2938 |
| | ca | | ccgcataag | | TGAGCT | | GGAGCTTCC | |
| SluM60 | gaccctttgctcctttca | 2381 | gctcctttgtt | 2567 | TTGGGCGGATCAAT | 2753 | GTGCAATCAAG | 2939 |
| | ca | | ccgcataag | | TGAGCT | | CAGAAGCCC | |
| SluM61 | gaccctttgctcctttca | 2382 | gctcctttgtt | 2568 | TTGGGCGGATCAAT | 2754 | GTGCAATCAAG | 2940 |
| | ca | | ccgcataag | | TGAGCT | | CAGAAGCCC | |
| SluM62 | gaccctttgctcctttca | 2383 | gctcctttgtt | 2569 | CCTGAAGTTGCCCA | 2755 | AGGAAGCGGA | 2941 |
| | ca | | ccgcataag | | CTCTGT | | CAAAAGACGT | |
| SluM63 | gaccctttgctcctttca | 2384 | gctcctttgtt | 2570 | CCTGAAGTTGCCCA | 2756 | AGGAAGCGGA | 2942 |
| | ca | | ccgcataag | | CTCTGT | | CAAAAGACGT | |
| SluM64 | gaccctttgctcctttca | 2385 | gctcctttgtt | 2571 | CCTGAAGTTGCCCA | 2757 | AGGAAGCGGA | 2943 |
| | ca | | ccgcataag | | CTCTGT | | CAAAAGACGT | |
| SluM65 | gaccctttgctcctttca | 2386 | gctcctttgtt | 2572 | CCTGAAGTTGCCCA | 2758 | AGGAAGCGGA | 2944 |
| | ca | | ccgcataag | | CTCTGT | | CAAAAGACGT | |
| SluM66 | gaccctttgctcctttca | 2387 | gctcctttgtt | 2573 | CCTGAAGTTGCCCA | 2759 | AGGAAGCGGA | 2945 |
| | ca | | ccgcataag | | CTCTGT | | CAAAAGACGT | |
| SluM67 | gaccctttgctcctttca | 2388 | gctcctttgtt | 2574 | CCTGAAGTTGCCCA | 2760 | AGGAAGCGGA | 2946 |
| | ca | | ccgcataag | | CTCTGT | | CAAAAGACGT | |
| SluM68 | gaccctttgctcctttca | 2389 | gctcctttgtt | 2575 | CCTGAAGTTGCCCA | 2761 | AGGAAGCGGA | 2947 |
| | ca | | ccgcataag | | CTCTGT | | CAAAAGACGT | |
| SluM69 | gaccctttgctcctttca | 2390 | gctcctttgtt | 2576 | CCTGAAGTTGCCCA | 2762 | AGGAAGCGGA | 2948 |
| | ca | | ccgcataag | | CTCTGT | | CAAAAGACGT | |
| SluM70 | gaccctttgctcctttca | 2391 | gctcctttgtt | 2577 | TGAGTCTGAGTACC | 2763 | GAAAGAGCTA | 2949 |
| | ca | | ccgcataag | | CGAGGG | | GCAGCAACGC | |
| SluM71 | gaccctttgctcctttca | 2392 | gctcctttgtt | 2578 | CCTGAAGTTGCCCA | 2764 | AGGAAGCGGA | 2950 |
| | ca | | ccgcataag | | CTCTGT | | CAAAAGACGT | |
| SluM72 | gaccctttgctcctttca | 2393 | gctcctttgtt | 2579 | TGAGTCTGAGTACC | 2765 | GAAAGAGCTA | 2951 |
| | ca | | ccgcataag | | CGAGGG | | GCAGCAACGC | |
| SluM73 | gaccctttgctcctttca | 2394 | gctcctttgtt | 2580 | TGAGTCTGAGTACC | 2766 | GAAAGAGCTA | 2952 |
| | ca | | ccgcataag | | CGAGGG | | GCAGCAACGC | |
| SluM74 | gaccctttgctcctttca | 2395 | gctcctttgtt | 2581 | TGAGTCTGAGTACC | 2767 | GAAAGAGCTA | 2953 |
| | ca | | ccgcataag | | CGAGGG | | GCAGCAACGC | |
| SluM75 | gagagaggagacatgaag | 2396 | catgttcacca | 2582 | CAGCAACTGCAGC | 2768 | ACGTGGCTCAG | 2954 |
| | g | | accagatgc | | AACTCAG | | TAACATGGG | |
| SluM76 | gagagaggagacatgaag | 2397 | catgttcacca | 2583 | GCAACCCATTAGCC | 2769 | TGAGCACTCCA | 2955 |
| | g | | accagatgc | | CAGACT | | AAATCCCCC | |
| SluM77 | gagagaggagacatgaag | 2398 | catgttcacca | 2584 | GCAACCCATTAGCC | 2770 | GAGCACTCCAA | 2956 |
| | g | | accagatgc | | CAGACT | | AATCCCCCA | |
| SluM78 | gagagaggagacatgaag | 2399 | catgttcacca | 2585 | GCAACCCATTAGCC | 2771 | GAGCACTCCAA | 2957 |
| | g | | accagatgc | | CAGACT | | AATCCCCCA | |
| SluM79 | gagagaggagacatgaag | 2400 | catgttcacca | 2586 | GCAACCCATTAGCC | 2772 | GAGCACTCCAA | 2958 |
| | g | | accagatgc | | CAGACT | | AATCCCCCA | |
| SluM80 | gagagaggagacatgaag | 2401 | catgttcacca | 2587 | GCAACCCATTAGCC | 2773 | GAGCACTCCAA | 2959 |
| | g | | accagatgc | | CAGACT | | AATCCCCCA | |
| SluM81 | gagagaggagacatgaag | 2402 | catgttcacca | 2588 | GCAACCCATTAGCC | 2774 | GAGCACTCCAA | 2960 |
| | g | | accagatgc | | CAGACT | | AATCCCCCA | |
| SluM82 | gagagaggagacatgaag | 2403 | catgttcacca | 2589 | GCAACCCATTAGCC | 2775 | GAGCACTCCAA | 2961 |
| | g | | accagatgc | | CAGACT | | AATCCCCCA | |
| SluM83 | gagagaggagacatgaag | 2404 | catgttcacca | 2590 | GGAAGCTATACCCA | 2776 | CAGGAAGCTGC | 2962 |
| | g | | accagatgc | | CCACCG | | AGGTCTTCA | |
| SluM84 | gagagaggagacatgaag | 2405 | catgttcacca | 2591 | AGCCAGACCAGAC | 2777 | CAGGAAGCTGC | 2963 |
| | g | | accagatgc | | ACACAAC | | AGGTCTTCA | |
| SluM85 | gagagaggagacatgaag | 2406 | catgttcacca | 2592 | AGCCAGACCAGAC | 2778 | CAGGAAGCTGC | 2964 |
| | g | | accagatgc | | ACACAAC | | AGGTCTTCA | |
| SluM86 | gagagaggagacatgaag | 2407 | catgttcacca | 2593 | AGCCAGACCAGAC | 2779 | CAGGAAGCTGC | 2965 |
| | g | | accagatgc | | ACACAAC | | AGGTCTTCA | |
| SluM87 | gagagaggagacatgaag | 2408 | catgttcacca | 2594 | AGCCAGACCAGAC | 2780 | CAGGAAGCTGC | 2966 |
| | g | | accagatgc | | ACACAAC | | AGGTCTTCA | |
| SluM88 | gagagaggagacatgaag | 2409 | catgttcacca | 2595 | AGCCAGACCAGAC | 2781 | CAGGAAGCTGC | 2967 |
| | g | | accagatgc | | ACACAAC | | AGGTCTTCA | |
| SluM89 | gagagaggagacatgaag | 2410 | catgttcacca | 2596 | AGCCAGACCAGAC | 2782 | CAGGAAGCTGC | 2968 |
| | g | | accagatgc | | ACACAAC | | AGGTCTTCA | |
| SluM90 | gagagaggagacatgaag | 2411 | catgttcacca | 2597 | AGCCAGACCAGAC | 2783 | CAGGAAGCTGC | 2969 |
| | g | | accagatgc | | ACACAAC | | AGGTCTTCA | |
| SluM91 | gagagaggagacatgaag | 2412 | catgttcacca | 2598 | AGCCAGACCAGAC | 2784 | CAGGAAGCTGC | 2970 |
| | g | | accagatgc | | ACACAAC | | AGGTCTTCA | |
| SluM92 | ggtgagttcccatgattg | 2413 | caggagcgatt | 2599 | CAGCCCAGACATCC | 2785 | GGGAAGGAGG | 2971 |
| | | | gaaagaca | | ACATGT | | GACATGGAGA | |
| SluM93 | ggtgagttcccatgattg | 2414 | caggagcgatt | 2600 | CAGCCCAGACATCC | 2786 | GGGAAGGAGG | 2972 |
| | | | gaaagaca | | ACATGT | | GACATGGAGA | |
| SluM94 | ggtgagttcccatgattg | 2415 | caggagcgatt | 2601 | CAGCCCAGACATCC | 2787 | GACTGAGCCTG | 2973 |
| | | | gaaagaca | | ACATGT | | GGATTTGCT | |
| SluM95 | ggtgagttcccatgattg | 2416 | caggagcgatt | 2602 | CAGCCCAGACATCC | 2788 | GACTGAGCCTG | 2974 |
| | | | gaaagaca | | ACATGT | | GGATTTGCT | |
| SluM96 | ggtgagttcccatgattg | 2417 | caggagcgatt | 2603 | CAGCCCAGACATCC | 2789 | GACTGAGCCTG | 2975 |
| | | | gaaaagac | | ACATGT | | GGATTTGCT | |
| SluM97 | ggtgagttcccatgattg | 2418 | caggagcgatt | 2604 | CAGCCCAGACATCC | 2790 | GACTGAGCCTG | 2976 |
| | | | gaaaagac | | ACATGT | | GGATTTGCT | |
| SluM98 | ggtgagttcccatgattg | 2419 | caggagcgatt | 2605 | CAGCCCAGACATCC | 2791 | GACTGAGCCTG | 2977 |
| | | | gaaagaca | | ACATGT | | GGATTTGCT | |
| SluM99 | ggtgagttcccatgattg | 2420 | caggagcgatt | 2606 | CAGCCCAGACATCC | 2792 | GACTGAGCCTG | 2978 |
| | | | gaaagaca | | ACATGT | | GGATTTGCT | |
| sluM100 | ggtgagttcccatgattg | 2421 | caggagcgatt | 2607 | CAGCCCAGACATCC | 2793 | GATGGGCTCAT | 2979 |
| | | | gaaagaca | | ACATGT | | GGTCTCTCG | |
| slum101 | ggtgagttcccatgattg | 2422 | caggagcgatt | 2608 | CAGCCCAGACATCC | 2794 | GATGGGCTCAT | 2980 |
| | | | gaaagaca | | ACATGT | | GGTCTCTCG | |
| SluM102 | ggtgagttcccatgattg | 2423 | caggagcgatt | 2609 | CAGCCCAGACATCC | 2795 | GATGGGCTCAT | 2981 |
| | | | gaaagaca | | ACATGT | | GGTCTCTCG | |
| SluM103 | ggtgagttcccatgattg | 2424 | caggagcgatt | 2610 | CAGCCCAGACATCC | 2796 | GATGGGCTCAT | 2982 |
| | | | gaaagaca | | ACATGT | | GGTCTCTCG | |
| SluM104 | ggtgagttcccatgattg | 2425 | caggagcgatt | 2611 | CAGCCCAGACATCC | 2797 | GATGGGCTCAT | 2983 |
| | | | gaaagaca | | ACATGT | | GGTCTCTCG | |
| SluM105 | ggtgagttcccatgattg | 2426 | caggagcgatt | 2612 | CAGCCCAGACATCC | 2798 | GATGGGCTCAT | 2984 |
| | | | gaaagaca | | ACATGT | | GGTCTCTCG | |
| SluM106 | ggtgagttcccatgattg | 2427 | caggagcgatt | 2613 | CAGCCCAGACATCC | 2799 | GATGGGCTCAT | 2985 |
| | | | gaaagaca | | ACATGT | | GGTCTCTCG | |
| SluM107 | ggtgagttcccatgattg | 2428 | caggagcgatt | 2614 | CAGCCCAGACATCC | 2800 | GATGGGCTCAT | 2986 |
| | | | gaaagaca | | ACATGT | | GGTCTCTCG | |
| SluM108 | ggtgagttcccatgattg | 2429 | caggagcgatt | 2615 | CAGCCCAGACATCC | 2801 | GATGGGCTCAT | 2987 |
| | | | gaaagaca | | ACATGT | | GGTCTCTCG | |
| SluM109 | ggtgagttcccatgattg | 2430 | caggagcgatt | 2616 | CAGCCCAGACATCC | 2802 | GATGGGCTCAT | 2988 |
| | | | gaaagaca | | ACATGT | | GGTCTCTCG | |
| slum110 | ggtgagttcccatgattg | 2431 | caggagcgatt | 2617 | CAGCCCAGACATCC | 2803 | GATGGGCTCAT | 2989 |
| | | | gaaagaca | | ACATGT | | GGTCTCTCG | |
| slum111 | ggtgagttcccatgattg | 2432 | caggagcgatt | 2618 | CAGCCCAGACATCC | 2804 | GATGGGCTCAT | 2990 |
| | | | gaaagaca | | ACATGT | | GGTCTCTCG | |
| SluM112 | ggtgagttcccatgattg | 2433 | caggagcgatt | 2619 | CAAGGTGCTGAGA | 2805 | GGTGCTGTTCC | 2991 |
| | | | gaaagaca | | GCCAAGA | | CATGCTTTG | |
| SluM113 | ggtgagttcccatgattg | 2434 | caggagcgatt | 2620 | CAAGGTGCTGAGA | 2806 | GTGCTGTTCCC | 2992 |
| | | | gaaagaca | | GCCAAGA | | ATGCTTTGG | |
| SluM114 | ggtgagttcccatgattg | 2435 | caggagcgatt | 2621 | CAAGGTGCTGAGA | 2807 | GTGCTGTTCCC | 2993 |
| | | | gaaagaca | | GCCAAGA | | ATGCTTTGG | |
| SluM115 | ggtgagttcccatgattg | 2436 | caggagcgatt | 2622 | CAAGGTGCTGAGA | 2808 | GTGCTGTTCCC | 2994 |
| | | | gaaagaca | | GCCAAGA | | ATGCTTTGG | |
| SluM116 | ggtgagttcccatgattg | 2437 | caggagcgatt | 2623 | CAAGGTGCTGAGA | 2809 | GTGCTGTTCCC | 2995 |
| | | | gaaagaca | | GCCAAGA | | ATGCTTTGG | |
| SluM117 | ggtgagttcccatgattg | 2438 | caggagcgatt | 2624 | CAAGGTGCTGAGA | 2810 | GTGCTGTTCCC | 2996 |
| | | | gaaagaca | | GCCAAGA | | ATGCTTTGG | |
| slutm118 | ggtgagttcccatgattg | 2439 | caggagcgatt | 2625 | CAAGGTGCTGAGA | 2811 | GTGCTGTTCCC | 2997 |
| | | | gaaagaca | | GCCAAGA | | ATGCTTTGG | |
| SluM119 | ggtgagttcccatgattg | 2440 | caggagcgatt | 2626 | CAAGGTGCTGAGA | 2812 | GTGCTGTTCCC | 2998 |
| | | | gaaagaca | | GCCAAGA | | ATGCTTTGG | |
| SluM120 | ggtgagttcccatgattg | 2441 | caggagcgatt | 2627 | CAAGGTGCTGAGA | 2813 | GTGCTGTTCCC | 2999 |
| | | | gaaagaca | | GCCAAGA | | ATGCTTTGG | |
| SluM121 | ggtgagttcccatgattg | 2442 | caggagcgatt | 2628 | CAAGGTGCTGAGA | 2814 | GTGCTGTTCCC | 3000 |
| | | | gaaagaca | | GCCAAGA | | ATGCTTTGG | |
| SluM122 | ggtgagttcccatgattg | 2443 | caggagcgatt | 2629 | CAAGGTGCTGAGA | 2815 | GTGCTGTTCCC | 3001 |
| | | | gaaagaca | | GCCAAGA | | ATGCTTTGG | |
| SluM123 | ggtgagttcccatgattg | 2444 | caggagcgatt | 2630 | CAAGGTGCTGAGA | 2816 | GTGCTGTTCCC | 3002 |
| | | | gaaagaca | | GCCAAGA | | ATGCTTTGG | |
| SluM124 | ggtgagttcccatgattg | 2445 | caggagcgatt | 2631 | CAAGGTGCTGAGA | 2817 | GTGCTGTTCCC | 3003 |
| | | | gaaagaca | | GCCAAGA | | ATGCTTTGG | |
| SluM125 | ggtgagttcccatgattg | 2446 | caggagcgatt | 2632 | CAAGGTGCTGAGA | 2818 | GTGCTGTTCCC | 3004 |
| | | | gaaagaca | | GCCAAGA | | ATGCTTTGG | |
| SluM126 | ggtgagttcccatgattg | 2447 | caggagcgatt | 2633 | GGTCTCGAGGTTGT | 2819 | CTGAGTTGCTG | 3005 |
| | | | gaaagaca | | CACTGG | | CAGTTGCTG | |
| SluM127 | ggtgagttcccatgattg | 2448 | caggagcgatt | 2634 | GGTCTCGAGGTTGT | 2820 | CTGAGTTGCTG | 3006 |
| | | | gaaagaca | | CACTGG | | CAGTTGCTG | |
| SluM128 | ggtgagttcccatgattg | 2449 | caggagcgatt | 2635 | GGTCTCGAGGTTGT | 2821 | AGTCTGGGCTA | 3007 |
| | | | gaaagaca | | CACTGG | | ATGGGTTGC | |
| SluM129 | ggtgagttcccatgattg | 2450 | caggagcgatt | 2636 | CCCGGGACATAAA | 2822 | AGTCTGGGCTA | 3008 |
| | | | gaaagaca | | GGTGGAC | | ATGGGTTGC | |
| SluM130 | ggtgagttcccatgattg | 2451 | caggagcgatt | 2637 | GGTCTCGAGGTTGT | 2823 | AGTCTGGGCTA | 3009 |
| | | | gaaagaca | | CACTGG | | ATGGGTTGC | |
| SluM131 | ggtgagttcccatgattg | 2452 | caggagcgatt | 2638 | GGTCTCGAGGTTGT | 2824 | AGTCTGGGCTA | 3010 |
| | | | gaaagaca | | CACTGG | | ATGGGTTGC | |
| SluM132 | ggtgagttcccatgattg | 2453 | caggagcgatt | 2639 | CCCGGGACATAAA | 2825 | AGTCTGGGCTA | 3011 |
| | | | gaaagaca | | GGTGGAC | | ATGGGTTGC | |
| SluM133 | ggtgagttcccatgattg | 2454 | caggagcgatt | 2640 | CCCGGGACATAAA | 2826 | AGTCTGGGCTA | 3012 |
| | | | gaaagaca | | GGTGGAC | | ATGGGTTGC | |
| SluM134 | ggtgagttcccatgattg | 2455 | caggagcgatt | 2641 | CCCGGGACATAAA | 2827 | AGTCTGGGCTA | 3013 |
| | | | gaaagaca | | GGTGGAC | | ATGGGTTGC | |
| SluM135 | ggtgagttcccatgattg | 2456 | caggagcgatt | 2642 | AGTGTGAGTCAGG | 2828 | AGTCTGGGCTA | 3014 |
| | | | gaaagaca | | GGTCAGA | | ATGGGTTGC | |
| SluM136 | ggtgagttcccatgattg | 2457 | caggagcgatt | 2643 | AGTGTGAGTCAGG | 2829 | AGTCTGGGCTA | 3015 |
| | | | gaaagaca | | GGTCAGA | | ATGGGTTGC | |
| SluM137 | ggtgagttcccatgattg | 2458 | caggagcgatt | 2644 | AGTGTGAGTCAGG | 2830 | AGTCTGGGCTA | 3016 |
| | | | gaaagaca | | GGTCAGA | | ATGGGTTGC | |
| SluM138 | ggtgagttcccatgattg | 2459 | caggagcgatt | 2645 | AGTGTGAGTCAGG | 2831 | AGTCTGGGCTA | 3017 |
| | | | gaaagaca | | GGTCAGA | | ATGGGTTGC | |
| SluM139 | ggtgagttcccatgattg | 2460 | caggagcgatt | 2646 | AGTGTGAGTCAGG | 2832 | AGTCTGGGCTA | 3018 |
| | | | gaaagaca | | GGTCAGA | | ATGGGTTGC | |
| SluM140 | ggtgagttcccatgatgt | 2461 | caggagcgatt | 2647 | AGTGTGAGTCAGG | 2833 | AGTCTGGGCTA | 3019 |
| | | | gaaagaca | | GGTCAGA | | ATGGGTTGC | |
| SluM141 | ggtgagttcccatgattg | 2462 | caggagcgatt | 2648 | AGTGTGAGTCAGG | 2834 | AGTCTGGGCTA | 3020 |
| | | | gaaagaca | | GGTCAGA | | ATGGGTTGC | |
| SluM142 | ggtgagttcccatgattg | 2463 | caggagcgatt | 2649 | AGTGTGAGTCAGG | 2835 | AGTCTGGGCTA | 3021 |
| | | | gaaagaca | | GGTCAGA | | ATGGGTTGC | |
| SluM143 | ggtgagttcccatgattg | 2464 | caggagcgatt | 2650 | AGTGTGAGTCAGG | 2836 | AGTCTGGGCTA | 3022 |
| | | | gaaagaca | | GGTCAGA | | ATGGGTTGC | |
| SluM144 | ggtgagttcccatgattg | 2465 | caggagcgatt | 2651 | TCACCAGTTCTGTG | 2837 | CCTGCTTTCTT | 3023 |
| | | | gaaagaca | | GGCATC | | GTGCCTCCT | |
| SluM145 | ggtgagttcccatgattg | 2466 | caggagcgatt | 2652 | TCACCAGTTCTGTG | 2838 | CCTGCTTTCTT | 3024 |
| | | | gaaagaca | | GGCATC | | GTGCCTCCT | |
| SluM146 | ggtgctgacccatgattg | 2467 | caggagcgcttt | 2653 | AGTGTGAGTCAGG | 2839 | AGTCTGGGCTA | 3025 |
| | | | gaaagaca | | GGTCAGA | | ATGGGTTGC | |
| SluM147 | ggtgctgacccatgattg | 2468 | caggagcgcttt | 2654 | TCACCAGTTCTGTG | 2840 | GTTGTGTGTCT | 3026 |
| | | | gaaagaca | | GGCATC | | GGTCTGGCT | |
| SluM148 | ggtgctgacccatgattg | 2469 | caggagcgcttt | 2655 | TCACCAGTTCTGTG | 2841 | GTTGTGTGTCT | 3027 |
| | | | gaaagaca | | GGCATC | | GGTCTGGCT | |
| SluM149 | ggtgctgacccatgattg | 2470 | caggagcgcttt | 2656 | TCACCAGTTCTGTG | 2842 | GTTGTGTGTCT | 3028 |
| | | | gaaagaca | | GGCATC | | GGTCTGGCT | |
| SluM150 | ggtgctgacccatgattg | 2471 | caggagcgcttt | 2657 | TCACCAGTTCTGTG | 2843 | GTTGTGTGTCT | 3029 |
| | | | gaaagaca | | GGCATC | | GGTCTGGCT | |
| SluM151 | ggtgctgacccatgattg | 2472 | caggagcgcttt | 2658 | TCACCAGTTCTGTG | 2844 | GTTGTGTGTCT | 3030 |
| | | | gaaagaca | | GGCATC | | GGTCTGGCT | |
| SluM152 | ggtgctgacccatgattg | 2473 | caggagcgcttt | 2659 | TCACCAGTTCTGTG | 2845 | GTTGTGTGTCT | 3031 |
| | | | gaaagaca | | GGCATC | | GGTCTGGCT | |
| SluM153 | ggtgctgacccatgattg | 2474 | caggagcgcttt | 2660 | TCACCAGTTCTGTG | 2846 | GTTGTGTGTCT | 3032 |
| | | | gaaagaca | | GGCATC | | GGTCTGGCT | |
| SluM154 | ggtgctgacccatgattg | 2475 | caggagcgcttt | 2661 | TCACCAGTTCTGTG | 2847 | GTTGTGTGTCT | 3033 |
| | | | gaaagaca | | GGCATC | | GGTCTGGCT | |
| SluM155 | ggtgctgacccatgattg | 2476 | caggagcgcttt | 2662 | AGCAGCTGGTCCAT | 2848 | CATGTGGATGT | 3034 |
| | | | gaaagaca | | TTACCC | | CTGGGCTGT | |
| SluM156 | ggtgctgacccatgattg | 2477 | caggagcgcttt | 2663 | AGCAGCTGGTCCAT | 2849 | CATGTGGATGT | 3035 |
| | | | gaaagaca | | TTACCC | | CTGGGCTGT | |
| SluM157 | ggtgctgacccatgattg | 2478 | caggagcgcttt | 2664 | AGCAGCTGGTCCAT | 2850 | CATGTGGATGT | 3036 |
| | | | gaaagaca | | TTACCC | | CTGGGCTGT | |
| SluM158 | ggtgctgacccatgattg | 2479 | caggagcgcttt | 2665 | AGCAGCTGGTCCAT | 2851 | CATGTGGATGT | 3037 |
| | | | gaaagaca | | TTACCC | | CTGGGCTGT | |
| SluM159 | ggtgctgacccatgattg | 2480 | caggagcgcttt | 2666 | AGCAGCTGGTCCAT | 2852 | CATGTGGATGT | 3038 |
| | | | gaaagaca | | TTACCC | | CTGGGCTGT | |
| SluM160 | ggtgctgacccatgattg | 2481 | caggagcgcttt | 2667 | AGCAGCTGGTCCAT | 2853 | TCTTGGCTCTC | 3039 |
| | | | gaaagaca | | TTACCC | | AGCACCTTG | |
| SluM161 | ggtgctgacccatgattg | 2482 | caggagcgcttt | 2668 | AGCAGCTGGTCCAT | 2854 | TCTTGGCTCTC | 3040 |
| | | | gaaagaca | | TTACCC | | AGCACCTTG | |
| SluM162 | ggtgctgacccatgattg | 2483 | caggagcgcttt | 2669 | AGCAGCTGGTCCAT | 2855 | TCTTGGCTCTC | 3041 |
| | | | gaaagaca | | TTACCC | | AGCACCTTG | |
| SluM163 | ggtgctgacccatgattg | 2484 | caggagcgcttt | 2670 | AGCAGCTGGTCCAT | 2856 | TCTTGGCTCTC | 3042 |
| | | | gaaagaca | | TTACCC | | AGCACCTTG | |
| SluM164 | ggtgctgacccatgattg | 2485 | caggagcgcttt | 2671 | GGCCATGAGTAGCT | 2857 | TCTTGGCTCTC | 3043 |
| | | | gaaagaca | | TGAGCA | | AGCACCTTG | |
| SluM165 | ggtgctgacccatgattg | 2486 | caggagcgcttt | 2672 | GGCCATGAGTAGCT | 2858 | TCTTGGCTCTC | 3044 |
| | | | gaaagaca | | TGAGCA | | AGCACCTTG | |
| SluM166 | ggtgctgacccatgattg | 2487 | caggagcgcttt | 2673 | GGCCATGAGTAGCT | 2859 | TCTTGGCTCTC | 3045 |
| | | | gaaagaca | | TGAGCA | | AGCACCTTG | |
| SluM167 | ggtgctgacccatgattg | 2488 | caggagcgcttt | 2674 | GGCCATGAGTAGCT | 2860 | TCTTGGCTCTC | 3046 |
| | | | gaaagaca | | TGAGCA | | AGCACCTTG | |
| SluM168 | ggtgctgacccatgattg | 2489 | caggagcgcttt | 2675 | GAGGTGAGCAGAG | 2861 | TCTTGGCTCTC | 3047 |
| | | | gaaagaca | | CTICCTG | | AGCACCTTG | |
| SluM169 | ggtgctgacccatgattg | 2490 | caggagcgcttt | 2676 | GAGGTGAGCAGAG | 2862 | TCTTGGCTCTC | 3048 |
| | | | gaaagaca | | CTICCTG | | AGCACCTTG | |
| SluM170 | ggtgctgacccatgattg | 2491 | caggagcgcttt | 2677 | TTAGTTGGGCTTGG | 2863 | CTTTATGTCCC | 3049 |
| | | | gaaagaca | | TGGGAC | | GGGGAGGTG | |
| SluM171 | ggtgctgacccatgattg | 2492 | caggagcgcttt | 2678 | TTAGTTGGGCTTGG | 2864 | CTTTATGTCCC | 3050 |
| | | | gaaagaca | | TGGGAC | | GGGGAGGTG | |
| SluM172 | ggtgctgacccatgattg | 2493 | caggagcgcttt | 2679 | TTAGTTGGGCTTGG | 2865 | CTTTATGTCCC | 3051 |
| | | | gaaagaca | | TGGGAC | | GGGGAGGTG | |
| SluM173 | ggtgctgacccatgattg | 2494 | caggagcgcttt | 2680 | TTAGTTGGGCTTGG | 2866 | CTTTATGTCCC | 3052 |
| | | | gaaagaca | | TGGGAC | | GGGGAGGTG | |
| SluM174 | ggtgctgacccatgattg | 2495 | caggagcgcttt | 2681 | TTAGTTGGGCTTGG | 2867 | CTTTATGTCCC | 3053 |
| | | | gaaagaca | | TGGGAC | | GGGGAGGTG | |
| SluM175 | ggtgctgacccatgattg | 2496 | caggagcgcttt | 2682 | TTAGTTGGGCTTGG | 2868 | CTTTATGTCCC | 3054 |
| | | | gaaagaca | | TGGGAC | | GGGGAGGTG | |
| SluM176 | ggtgctgacccatgattg | 2497 | caggagcgcttt | 2683 | TTAGTTGGGCTTGG | 2869 | GTCAAACCCTC | 3055 |
| | | | gaaagaca | | TGGGAC | | ACAGGCTCA | |
| SluM177 | ggtgctgacccatgattg | 2498 | caggagcgcttt | 2684 | TTAGTTGGGCTTGG | 2870 | GTCAAACCCTC | 3056 |
| | | | gaaagaca | | TGGGAC | | ACAGGCTCA | |
| SluM178 | ctggagggaagggttag | 2499 | cccagtcagcca | 2685 | ATTGTTCCGTGGGT | 2871 | CAGTGCCAGCA | 3057 |
| | ctc | | caaaatca | | GGAGTC | | AGACTAGCT | |
| SluM179 | ctggagggaagggttag | 2500 | cccagtcagcca | 2686 | ATTGTTCCGTGGGT | 2872 | CAGTGCCAGCA | 3058 |
| | ctc | | caaaatca | | GGAGTC | | AGACTAGCT | |
| SluM180 | ctggagggaagggttag | 2501 | cccagtcagcca | 2687 | ATTGTTCCGTGGGT | 2873 | CAGTGCCAGCA | 3059 |
| | ctc | | caaaatca | | GGAGTC | | AGACTAGCT | |
| SluM181 | ctggagggaagggttag | 2502 | cccagtcagcca | 2688 | ATTGTTCCGTGGGT | 2874 | CAGTGCCAGCA | 3060 |
| | ctc | | caaaatca | | GGAGTC | | AGACTAGCT | |
| SluM182 | ctggagggaagggttag | 2503 | cccagtcagcca | 2689 | TGTTTGCTGTGTAC | 2875 | TGCGCCTGGCT | 3061 |
| | ctc | | caaaatca | | CAGGCA | | AATTTGTTG | |
| SluM183 | ctggagggaagggttag | 2504 | cccagtcagcca | 2690 | TGTTTGCTGTGTAC | 2876 | TGCGCCTGGCT | 3062 |
| | ctc | | caaaatca | | CAGGCA | | AATTTGTTG | |
| SluM184 | ctggagggaagggttag | 2505 | cccagtcagcca | 2691 | TGTTTGCTGTGTAC | 2877 | TGCGCCTGGCT | 3063 |
| | ctc | | caaaatca | | CAGGCA | | AATTTGTTG | |
| SluM185 | ctggagggaagggttag | 2506 | cccagtcagcca | 2692 | TGTTTGCTGTGTAC | 2878 | TGCGCCTGGCT | 3064 |
| | ctc | | caaaatca | | CAGGCA | | AATTTGTTG | |
| SluM186 | ctggagggaagggttag | 2507 | cccagtcagcca | 2693 | CAGGTGATTTTGCC | 2879 | TCCCTGTCTTT | 3065 |
| | ctc | | caaaatca | | CAACCG | | CAAAGCGCT | |

TABLE 26
SluCas9 sgRNAs Categorized Based on Cleavage Efficiency

| Total INDEL % | Guides |
|---|---|
| Not detectable above | SluM8, SluM56, SluM57, SluM85, SluM106, SluM107, SluM108, SluM109, |
| assay threshold of | SluM110, SluM111, SluM114, SluM119, SluM121, SluM122, SluM123, |
| detection | SluM124, SluM125, SluM130, SluM132, SluM136, SluM178 |
| <15% | SluM1, SluM2, SluM3, SluM4, SluM5, SluM6, SluM7, SluM9, SluM10, |
| | SluM12, SluM17, SluM18, SluM19, SluM21, SluM22, SluM24, SluM25, |
| | SluM26, SluM27, SluM30, SluM31, SluM32, SluM33, SluM34, SluM35, |
| | SluM36, SluM37, SluM38, SluM40, SluM41, SluM42, SluM43, SluM44, |
| | SluM45, SluM46, SluM47, SluM48, SluM49, SluM51, SluM52, SluM53, |
| | SluM55, SluM58, SluM59, SluM60, SluM61, SluM62, SluM66, SluM68, |
| | SluM70, SluM72, SluM73, SluM74, SluM75, SluM76, SluM77, SluM81, |
| | SluM82, SluM83, SluM84, SluM86, SluM88, SluM89, SluM90, SluM92, |
| | SluM93, SluM96, SluM97, SluM98, SluM99, SluM100, SluM102, SluM117, |
| | SluM118, SluM128, SluM131, SluM133, SluM134, SluM140, SluM144, |
| | SluM145, SluM147, SluM148, SluM149, SluM154, SluM156, SluM158, |
| | SluM166, SluM167, SluM168, SluM169, SluM177, SluM179, SluM180, |
| | SluM181, SluM183, SluM184 |
| 15%-25% | SluM15, SluM54, SluM69, SluM87, SluM91, SluM101, SluM112, SluM135, |
| | SluM138, SluM139, SluM141, SluM143, SluM146, SluM151, SluM157, |
| | SluM161, SluM170, SluM171, SluM174, SluM175, SluM182, SluM185, |
| | SluM186 |
| >25% | SluM11, SluM13, SluM14, SluM16, SluM20, SluM23, SluM28, SluM29, |
| | SluM39, SluM50, SluM63, SluM64, SluM65, SluM67, SluM71, SluM78, |
| | SluM79, SluM80, SluM94, SluM95, SluM103, SluM104, SluM105, SluM113, |
| | SluM115, SluM116, SluM120, SluM126, SluM127, SluM129, SluM137, |
| | SluM142, SluM150, SluM152, SluM153, SluM155, SluM159, SluM160, |
| | SluM162, SluM163, SluM164, SluM165, SluM172, SluM173, SluM176 |

[0588] A subset of the SluCas9 sgRNAs was selected for inducing a microdeletion in FAAH-OUT. Specifically, 4 SluCas9 sgRNAs with high overall INDEL frequency and target sites upstream the FOP target sequence were selected as left gRNAs (SluM14, SluM29, SluM65, SluM71); and 10 SluCas9 sgRNAs with high overall INDEL frequency and target sites downstream the FOC target sequence were selected as right gRNAs (SluM79, SluM80, SluM94, SluM126, SluM142, SluM152, SluM155, SluM159, SluM162, SluM173). As shown in FIG. 6, the selected guides are ranked according to overall INDEL frequency at predicted cut sites. The selected SluCas9 sgRNAs and corresponding frequency of INDELs at predicted cut-sites is further identified in Table 27. The 4 left guides and 10 right guides were combined as 40 gRNA pairs to evaluate for inducing a microdeletion in FAAH-OUT. The selected SluCas9 gRNA pairs are identified in Table 28.

TABLE 27
Left and Right SluCas9 sgRNAs Targeting FAAH-OUT

| sgRNA Name | Indel % | L/R* |
|---|---|---|
| SluM14 | 59.55 | L |
| SluM29 | 50.8 | L |
| SluM65 | 76.3 | L |
| SluM71 | 61.85 | L |
| SluM79 | 59.4 | R |
| SluM80 | 80.55 | R |
| SluM94 | 58.8 | R |
| SluM126 | 51 | R |
| SluM142 | 52.15 | R |
| SluM152 | 53.4 | R |
| SluM155 | 76.25 | R |
| SluM159 | 57 | R |
| SluM162 | 62.8 | R |
| SluM173 | 64.2 | R |

*denotes Left (L) or Right (R) gRNA

[0589] Combinations of SluCas9 sgRNAs identified in Table 28 were evaluated for inducing a microdeletion in FAAH-OUT. Briefly, 0.3×10⁶ MCF7 cells were electroporated with a left and right sgRNA (1μg per each) and 1.5 μg SluCas9 protein. The cells were incubated 48-72 hours following electroporation, then harvested. Either genomic DNA was extracted for quantification of a genomic deletion in FAAH-OUT by ddPCR as described in Example 6, RNA was extracted for quantification of FAAH mRNA by qPCR as described in Example 2, or protein was extracted for quantification of FAAH protein by Simple Wes as described in Example 2.

[0590] As shown in FIG. 7A, the majority of sgRNA pairs evaluated resulted in a frequency of deletion of FAAH-OUT that exceeded 40%. Quantification of deletion for each sgRNA combination is provided in Table 28.

[0591] As shown in FIG. 7B, the FAAH mRNA levels in edited cells, measured as fold change relative to control cells electroporated with SpCas9 only using the 2\hat{ }(−ddCt) method, were reduced by 20% or more for all of the sgRNA combinations tested. Quantification of fold change is provided in Table 28.

[0592] As shown in FIG. 7C, the FAAH protein levels were also evaluated, with FAAH-protein normalized to GAPDH levels then calculated as fold change for treated cells relative to PBS control cells. FAAH protein levels were significantly reduced for most of the sgRNA combinations tested. Quantification of fold change in FAAH protein between treated and control samples is provided in Table 28.

TABLE 28
Left and Right SluCas9 sgRNAs Targeting FAAH-OUT

| | | FAAH mRNA | FAAH protein |
|---|---|---|---|
| gRNA pair ID | Deletion (%) | (fold change) | (fold change) |
| 1-SluM14/79 | 66.38 | 0.61472 | 0.5831 |
| 2-SluM14/80 | 61.46 | 0.63591 | 0.6989 |
| 3-SluM14/94 | 57.68 | 0.58022 | 0.5914 |
| 4-SluM14/126 | 53.21 | 0.55215 | 0.7636 |
| 5-SluM14/142 | 57.21 | 0.595 | 0.7514 |
| 6-SluM14/152 | 58.85 | 0.62672 | 0.6875 |
| 7-SluM14/155 | 53.08 | 0.57283 | 0.6517 |
| 8-SluM14/159 | 60.61 | 0.37462 | 0.7002 |
| 9-SluM14/162 | 60.77 | 0.53404 | 0.7458 |
| 10-SluM14/173 | 54.65 | 0.63636 | 0.6026 |
| 11-SluM29/79 | 67.03 | 0.75165 | 0.7761 |
| 12-SluM29/80 | 61.13 | 0.58613 | 0.6117 |
| 13-SluM29/94 | 71.15 | 0.55706 | 0.5334 |
| 14-SluM29/126 | 50.03 | 0.51897 | 0.6288 |
| 15-SluM29/142 | 57.4 | 0.58343 | 0.7904 |
| 16-SluM29/152 | 61.44 | 0.4752 | 0.699 |
| 17-SluM29/155 | 55.6 | 0.46952 | 0.7262 |
| 18-SluM29/159 | 60.39 | 0.60811 | 0.646 |
| 19-SluM29/162 | 60.52 | 0.57229 | 0.5562 |
| 20-SluM29/173 | 59.07 | 0.57218 | 0.5474 |
| 21-SluM65/79 | 67.86 | 0.76598 | 0.4112 |
| 22-SluM65/80 | 61.34 | 0.79858 | 0.4264 |
| 23-SluM65/94 | 57.56 | 0.57588 | 0.634 |
| 24-SluM65/126 | 47.06 | 0.64705 | 0.4103 |
| 25-SluM65/142 | 53.96 | 0.61421 | 0.3679 |
| 26-SluM65/152 | 62.94 | 0.67345 | 0.5503 |
| 27-SluM65/155 | 54.1 | 0.61046 | 0.488 |
| 28-SluM65/159 | 55.79 | 0.54364 | 0.4612 |
| 29-SluM65/162 | 56.32 | 0.65383 | 0.4643 |
| 30-SluM65/173 | 56.3 | 0.7675 | 0.4188 |
| 31-SluM71/79 | 66.84 | NA | 0.6128 |
| 32-SluM71/80 | 59.9 | 0.66776 | 0.7097 |
| 33-SluM71/94 | 58.9 | 0.58014 | 0.3905 |
| 34-SluM71/126 | 56.35 | 0.62803 | 0.9551 |
| 35-SluM71/142 | 55.79 | 0.58714 | 0.4151 |
| 36-SluM71/152 | 59.86 | 0.61155 | 0.6777 |
| 37-SluM71/155 | 57.49 | 0.71143 | 0.6415 |
| 38-SluM71/159 | 65.19 | 0.75368 | 0.342 |
| 39-SluM71/162 | 65.03 | 0.58835 | 0.5449 |
| 40-SluM71/173 | 58.75 | 0.72358 | 0.9359 |

### Example 8: Evaluation of In Vitro Gene Editing of SaCas9 gRNA Targeting FAAH-OUT

[0593] Frequency of INDELs induced at predicted cut sites in FAAH-OUT was evaluated following in vitro treatment with complexes of SluCas9 protein and sgRNA with spacers for SaCas9 as identified in Example 5.

[0594] Specifically, SaCas9 sgRNA were prepared with spacers shown in Table 20 (SaM1-SaM172; SEQ ID NOs: 1095-1266) inserted into a sgRNA backbone identified by SEQ ID NO: 1271. The SaCas9 sgRNA were provided as sequences that were chemically synthesized and modified by a commercial vendor.

[0595] The SaCas9 sgRNA were evaluated for gene-editing of FAAH-OUT in SaCas9-inducible HEK293T cells. The cells were induced to express SaCas9 by treatment with doxycycline at a concentration of 1 μg/mL for 24 hours prior to transfection. The transfection was mediated by Lipofectamine MessengerMax (ThermoFisher #LMRNA008) with SaCas9 sgRNA (200 ng gRNA in 50 k cells per 96-well) for 48-72 hours, and was performed in two biological duplicates. The cells were harvested and genomic DNA was extracted using a Quick DNA Kit—96 (Zymo #D3011). Following DNA quantification, a 1 μl volume containing 30-50 ng of genomic DNA was used for PCR amplification of regions containing predicted cut sites using Q5 Hot Start High Fidelity 2× Master Mix (New England BioLabs #M0494s). The PCR product was purified by AMPure XP PCR Purification (Beckman Coulter #A63881) then sequenced (Genewiz). TIDE PCR and sequencing primers are listed in Table 29.

[0596] The guides were categorized based on cleavage efficiency as measured by INDELs introduced at the predicted cut site. As shown in Table 30, guides without detectable cleavage efficiency (frequency of INDELs not detectable above threshold of the assay), with low cleavage efficiency (total frequency of INDELs less than 15%), moderate cleavage efficiency (total frequency of INDELs 15-25%), and high cleavage efficiency (total frequency of INDELs greater than 25%) are indicated.

TABLE 29
TIDE Analysis of SaCas9 gRNAs

| gRNA | PCR | SEQ | PCR | SEQ | | SEQ | | SEQ |
|---|---|---|---|---|---|---|---|---|
| ID NO | forward | ID NO | reverse | ID NO | TIDE seq1 | ID NO | TIDE seq2 | ID NO |
| saM1 | ccctgcccc | 3066 | ttgagcgtg | 3238 | CAGGATCTT | 3410 | GGAGGAGGC | 3582 |
| | ttgttactt | | tgggtttca | | GGCTCACTG | | TGATTTGTG | |
| | tc | | ag | | CA | | CT | |
| saM2 | ccctgcccc | 3067 | ttgagcgtg | 3239 | CAGGATCTT | 3411 | GGAGGAGGC | 3583 |
| | ttgttactt | | tgggtttca | | GGCTCACTG | | TGATTTGTG | |
| | tc | | ag | | CA | | CT | |
| saM3 | ccctgcccc | 3068 | ttgagcgtg | 3240 | CAGGATCTT | 3412 | GGAGGAGGC | 3584 |
| | ttgttactt | | tgggtttca | | GGCTCACTG | | TGATTTGTG | |
| | tc | | ag | | CA | | CT | |
| saM4 | ccctgcccc | 3069 | ttgagcgtg | 3241 | CAGGATCTT | 3413 | GGAGGAGGC | 3585 |
| | ttgttactt | | tgggtttca | | GGCTCACTG | | TGATTTGTG | |
| | tc | | ag | | CA | | CT | |
| saM5 | ccctgcccc | 3070 | ttgagcgtg | 3242 | GGAGGAGGC | 3414 | CAGGATCTT | 3586 |
| | ttgttactt | | tgggtttca | | TGATTTGTG | | GGCTCACTG | |
| | tc | | ag | | CT | | CA | |
| saM6 | ccctgcccc | 3071 | ttgagcgtg | 3243 | GGAGGAGGC | 3415 | CAGGATCTT | 3587 |
| | ttgttactt | | tgggtttca | | TGATTTGTG | | GGCTCACTG | |
| | tc | | ag | | CT | | CA | |
| saM7 | ccctgcccc | 3072 | ttgagcgtg | 3244 | GGCTTAGAG | 3416 | GGAGGAGGC | 3588 |
| | ttgttactt | | tgggtttca | | GATGGTGCT | | TGATTTGTG | |
| | tc | | ag | | CC | | CT | |
| saM8 | ccctgcccc | 3073 | ttgagcgtg | 3245 | GGTGCTGGC | 3417 | AAAGAAGCT | 3589 |
| | ttgttactt | | tgggtttca | | AGTGACAAA | | GTGGCAGTG | |
| | tc | | ag | | TG | | GA | |
| saM9 | ccctgcccc | 3074 | ttgagcgtg | 3246 | GGTGCTGGC | 3418 | AAAGAAGCT | 3590 |
| | ttgttactt | | tgggtttca | | AGTGACAAA | | GTGGCAGTG | |
| | tc | | ag | | TG | | GA | |
| saM10 | ccctgcccc | 3075 | ttgagcgtg | 3247 | GGTGCTGGC | 3419 | AAGCGAGGC | 3591 |
| | ttgttactt | | tgggtttca | | AGTGACAAA | | AAAAAGCTG | |
| | tc | | ag | | TG | | TG | |
| saM11 | ccctgcccc | 3076 | ttgagcgtg | 3248 | GGTGCTGGC | 3420 | AAGCGAGGC | 3592 |
| | ttgttactt | | tgggtttca | | AGTGACAAA | | AAAAAGCTG | |
| | tc | | ag | | TG | | TG | |
| saM12 | ccctgcccc | 3077 | ttgagcgtg | 3249 | AAGCGAGGC | 3421 | GGTGCTGGC | 3593 |
| | ttgttactt | | tgggtttca | | AAAAAGCTG | | AGTGACAAA | |
| | tc | | ag | | TG | | TG | |
| saM13 | ccctgcccc | 3078 | ttgagcgtg | 3250 | TTGCTTTTG | 3422 | GCACAAATC | 3594 |
| | ttgttactt | | tgggtttca | | ACCACGTGC | | AGCCTCCTC | |
| | tc | | ag | | AG | | CT | |
| saM14 | ccctgcccc | 3079 | ttgagcgtg | 3251 | CACAGCTTT | 3423 | CAAAACATA | 3595 |
| | ttgttactt | | tgggtttca | | TTGCCTCGC | | GCCGGGCAC | |
| | tc | | ag | | TT | | AG | |
| saM15 | ccctgcccc | 3080 | ttgagcgtg | 3252 | CACAGCTTT | 3424 | CAAAACATA | 3596 |
| | ttgttactt | | tgggtttca | | TTGCCTCGC | | GCCGGGCAC | |
| | tc | | ag | | TT | | AG | |
| saM16 | ccctgcccc | 3081 | ttgagcgtg | 3253 | CAAAACATA | 3425 | CACAGCTTT | 3597 |
| | ttgttactt | | tgggtttca | | GCCGGGCAC | | TTGCCTCGC | |
| | tc | | ag | | AG | | TT | |
| saM17 | ccctgcccc | 3082 | ttgagcgtg | 3254 | CACAGCTTT | 3426 | CAGCCTGGC | 3598 |
| | ttgttactt | | tgggtttca | | TTGCCTCGC | | CAACATAGT | |
| | tc | | ag | | TT | | GA | |
| saM18 | ccctgcccc | 3083 | ttgagcgtg | 3255 | CACAGCTTT | 3427 | CAGCCTGGC | 3599 |
| | ttgttactt | | tgggtttca | | TTGCCTCGC | | CAACATAGT | |
| | tc | | ag | | TT | | GA | |
| saM19 | ccctgcccc | 3084 | ttgagcgtg | 3256 | CACAGCTTT | 3428 | ATCTCAGCA | 3600 |
| | ttgttactt | | tgggtttca | | TTGCCTCGC | | CTTTGGGAG | |
| | tc | | ag | | TT | | GC | |
| saM20 | ctcatttgg | 3085 | tcacctttc | 3257 | GCACAGTAC | 3429 | TGCACGTGG | 3601 |
| | aaagtgggc | | actcactcc | | ACAGGACTG | | TCAAAAGCA | |
| | att | | cc | | CT | | AG | |
| saM21 | ctcatttgg | 3086 | tcacctttc | 3258 | CTGTGCCCG | 3430 | GTAGGAAAC | 3602 |
| | aaagtgggc | | actcactcc | | GCTATGTTT | | TTGGGAGGG | |
| | att | | cc | | TG | | cc | |
| saM22 | ctcatttgg | 3087 | tcacctttc | 3259 | GTAGGAAAC | 3431 | CTGTGCCCG | 3603 |
| | aaagtgggc | | actcactcc | | TTGGGAGGG | | GCTATGTTT | |
| | att | | cc | | CC | | TG | |
| saM23 | ctcatttgg | 3088 | tcacctttc | 3260 | CATTCTTCG | 3432 | TGGGTGCTG | 3604 |
| | aaagtgggc | | actcactcc | | GACACCAGC | | AGCATACAC | |
| | att | | cc | | CT | | AG | |
| saM24 | ctcatttgg | 3089 | tcacctttc | 3261 | AGCAGTCCT | 3433 | AAAGGAGCA | 3605 |
| | aaagtgggc | | actcactcc | | GTGTACTGT | | AAGGGTCAG | |
| | att | | cc | | GC | | GG | |
| saM25 | ctcatttgg | 3090 | tcacctttc | 3262 | AGCAGTCCT | 3434 | AAAGGAGCA | 3606 |
| | aaagtgggc | | actcactcc | | GTGTACTGT | | AAGGGTCAG | |
| | att | | cc | | GC | | GG | |
| saM26 | ctcatttgg | 3091 | tcacctttc | 3263 | AGCAGTCCT | 3435 | AAAGGAGCA | 3607 |
| | aaagtgggc | | actcactcc | | GTGTACTGT | | AAGGGTCAG | |
| | att | | cc | | GC | | GG | |
| saM27 | ctcatttgg | 3092 | tcacctttc | 3264 | AGCAGTCCT | 3436 | AAAGGAGCA | 3608 |
| | aaagtgggc | | actcactcc | | GTGTACTGT | | AAGGGTCAG | |
| | att | | cc | | GC | | GG | |
| saM28 | ctcatttgg | 3093 | tcacctttc | 3265 | AGCAGTCCT | 3437 | AAAGGAGCA | 3609 |
| | aaagtgggc | | actcactcc | | GTGTACTGT | | AAGGGTCAG | |
| | att | | cc | | GC | | GG | |
| saM29 | ctcatttgg | 3094 | tcacctttc | 3266 | AGCAGTCCT | 3438 | GGAGGCTGA | 3610 |
| | aaagtgggc | | actcactcc | | GTGTACTGT | | GGCAGGAAA | |
| | att | | cc | | GC | | AT | |
| saM30 | ctcatttgg | 3095 | tcacctttc | 3267 | GGAGGCTGA | 3439 | AGCAGTCCT | 3611 |
| | aaagtgggc | | actcactcc | | GGCAGGAAA | | GTGTACTGT | |
| | att | | cc | | AT | | GC | |
| saM31 | ctcatttgg | 3096 | tcacctttc | 3268 | GGTGGATTG | 3440 | AGCAGTCCT | 3612 |
| | aaagtgggc | | actcactcc | | CCTGAGGTC | | GTGTACTGT | |
| | att | | cc | | AA | | GC | |
| saM32 | ctcatttgg | 3097 | tcacctttc | 3269 | GGTGGATTG | 3441 | AGCAGTCCT | 3613 |
| | aaagtgggc | | actcactcc | | CCTGAGGTC | | GTGTACTGT | |
| | att | | cc | | AA | | GC | |
| saM33 | ctcatttgg | 3098 | tcacctttc | 3270 | GGTGGATTG | 3442 | AGCAGTCCT | 3614 |
| | aaagtgggc | | actcactcc | | CCTGAGGTC | | GTGTACTGT | |
| | att | | cc | | AA | | GC | |
| saM34 | ctcatttgg | 3099 | tcacctttc | 3271 | GGTGGATTG | 3443 | AGCAGTCCT | 3615 |
| | aaagtgggc | | actcactcc | | CCTGAGGTC | | GTGTACTGT | |
| | att | | cc | | AA | | GC | |
| saM35 | ctcatttgg | 3100 | tcacctttc | 3272 | GGTGGATTG | 3444 | AGCAGTCCT | 3616 |
| | aaagtgggc | | actcactcc | | CCTGAGGTC | | GTGTACTGT | |
| | att | | cc | | AA | | GC | |
| saM36 | ctcatttgg | 3101 | tcacctttc | 3273 | GGTGGATTG | 3445 | AGCAGTCCT | 3617 |
| | aaagtgggc | | actcactcc | | CCTGAGGTC | | GTGTACTGT | |
| | att | | cc | | AA | | GC | |
| saM37 | ctcatttgg | 3102 | tcacctttc | 3274 | TTTCTCTGG | 3446 | ATGGGTTCA | 3618 |
| | aaagtgggc | | actcactcc | | CTGGGCTTA | | ACTCCACAG | |
| | att | | cc | | GC | | CC | |
| saM38 | ctcatttgg | 3103 | tcacctttc | 3275 | GGCCCTCCC | 3447 | ATGGGTTCA | 3619 |
| | aaagtgggc | | actcactcc | | AAGTTTCCT | | ACTCCACAG | |
| | att | | cc | | AC | | CC | |
| saM39 | ctcatttgg | 3104 | tcacctttc | 3276 | TGGAAGCTC | 3448 | TGTGTATGC | 3620 |
| | aaagtgggc | | actcactcc | | CATTCAGGC | | TCAGCACCC | |
| | att | | cc | | AG | | AG | |
| saM40 | ctcatttgg | 3105 | tcacctttc | 3277 | TGGAAGCTC | 3449 | TGTGTATGC | 3621 |
| | aaagtgggc | | actcactcc | | CATTCAGGC | | TCAGCACCC | |
| | att | | cc | | AG | | AG | |
| saM41 | ctcatttgg | 3106 | tcacctttc | 3278 | CCCTGACCC | 3450 | CTTTCACTC | 3622 |
| | aaagtgggc | | actcactcc | | TTTGCTCCT | | ACTCCCCCA | |
| | att | | cc | | TT | | CC | |
| saM42 | ctcatttgg | 3107 | tcacctttc | 3279 | CCCTGACCC | 3451 | CTTTCACTC | 3623 |
| | aaagtgggc | | actcactcc | | TTTGCTCCT | | ACTCCCCCA | |
| | att | | cc | | TT | | CC | |
| saM43 | ctcatttgg | 3108 | tcacctttc | 3280 | CCCTGACCC | 3452 | CTTTCACTC | 3624 |
| | aaagtgggc | | actcactcc | | TTTGCTCCT | | ACTCCCCCA | |
| | att | | cc | | TT | | CC | |
| saM44 | ctcatttgg | 3109 | tcacctttc | 3281 | CTTTCACTC | 3453 | CCCTGACCC | 3625 |
| | aaagtgggc | | actcactcc | | ACTCCCCCA | | TTTGCTCCT | |
| | att | | cc | | CC | | TT | |
| saM45 | ctcatttgg | 3110 | tcacctttc | 3282 | ATTTTCCTG | 3454 | CTTTCACTC | 3626 |
| | aaagtgggc | | actcactcc | | CCTCAGCCT | | ACTCCCCCA | |
| | att | | cc | | CC | | CC | |
| saM46 | ctcatttgg | 3111 | tcacctttc | 3283 | CTTTCACTC | 3455 | ATTTTCCTG | 3627 |
| | aaagtgggc | | actcactcc | | ACTCCCCCA | | CCTCAGCCT | |
| | att | | cc | | CC | | CC | |
| saM47 | gaccctttg | 3112 | gctcctttg | 3284 | CTTTCACTC | 3456 | ATTTTCCTG | 3628 |
| | ctcctttca | | ttccgcata | | ACTCCCCCA | | CCTCAGCCT | |
| | ca | | ag | | CC | | CC | |
| saM48 | gaccctttg | 3113 | gctcctttg | 3285 | GGCTGTGGA | 3457 | CTTTCACTC | 3629 |
| | ctcctttca | | ttccgcata | | GTTGAACCC | | ACTCCCCCA | |
| | ca | | ag | | AT | | CC | |
| saM49 | gaccctttg | 3114 | gctcctttg | 3286 | GGCTGTGGA | 3458 | CCTTTCACT | 3630 |
| | ctcctttca | | ttccgcata | | GTTGAACCC | | CACTCCCCC | |
| | ca | | ag | | AT | | AC | |
| saM50 | gaccctttg | 3115 | gctcctttg | 3287 | GGCTGTGGA | 3459 | CCTTTCACT | 3631 |
| | ctcctttca | | ttccgcata | | GTTGAACCC | | CACTCCCCC | |
| | ca | | ag | | AT | | AC | |
| saM51 | gaccctttg | 3116 | gctcctttg | 3288 | GGCTGTGGA | 3460 | GCGTTGCTG | 3632 |
| | ctcctttca | | ttccgcata | | GTTGAACCC | | CTAGCTCTT | |
| | ca | | ag | | AT | | TC | |
| saM52 | gaccctttg | 3117 | gctcctttg | 3289 | GGCTGTGGA | 3461 | TTGGGCGGA | 3633 |
| | ctcctttca | | ttccgcata | | GTTGAACCC | | TCAATTGAG | |
| | ca | | ag | | AT | | CT | |
| saM53 | gaccctttg | 3118 | gctcctttg | 3290 | GGCTGTGGA | 3462 | TTGGGCGGA | 3634 |
| | ctcctttca | | ttccgcata | | GTTGAACCC | | TCAATTGAG | |
| | ca | | ag | | AT | | CT | |
| saM54 | gaccctttg | 3119 | gctcctttg | 3291 | GGCTGTGGA | 3463 | TTGGGCGGA | 3635 |
| | ctcctttca | | ttccgcata | | GTTGAACCC | | TCAATTGAG | |
| | ca | | ag | | AT | | CT | |
| saM55 | gaccctttg | 3120 | gctcctttg | 3292 | GGCTGTGGA | 3464 | TTGGGCGGA | 3636 |
| | ctcctttca | | ttccgcata | | GTTGAACCC | | TCAATTGAG | |
| | ca | | ag | | AT | | CT | |
| saM56 | gaccctttg | 3121 | gctcctttg | 3293 | GGCTGTGGA | 3465 | TTGGGCGGA | 3637 |
| | ctcctttca | | ttccgcata | | GTTGAACCC | | TCAATTGAG | |
| | ca | | ag | | AT | | CT | |
| saM57 | gaccctttg | 3122 | gctcctttg | 3294 | GTGCAATCA | 3466 | TTGGGCGGA | 3638 |
| | ctcctttca | | ttccgcata | | AGCAGAAGC | | TCAATTGAG | |
| | ca | | ag | | CC | | CT | |
| saM58 | gaccctttg | 3123 | gctcctttg | 3295 | GTGCAATCA | 3467 | TTGGGCGGA | 3639 |
| | ctcctttca | | ttccgcata | | AGCAGAAGC | | TCAATTGAG | |
| | ca | | ag | | CC | | CT | |
| saM59 | gaccctttg | 3124 | gctcctttg | 3296 | GTGCAATCA | 3468 | TTGGGCGGA | 3640 |
| | ctcctttca | | ttccgcata | | AGCAGAAGC | | TCAATTGAG | |
| | ca | | ag | | CC | | CT | |
| saM60 | gaccctttg | 3125 | gctcctttg | 3297 | TTGGGCGGA | 3469 | GTGCAATCA | 3641 |
| | ctcctttca | | ttccgcata | | TCAATTGAG | | AGCAGAAGC | |
| | ca | | ag | | CT | | cc | |
| saM61 | gaccctttg | 3126 | gctcctttg | 3298 | GGCTGTGGA | 3470 | GGGGGAGTG | 3642 |
| | ctcctttca | | ttccgcata | | GTTGAACCC | | AGTGAAAGG | |
| | ca | | ag | | AT | | TG | |
| saM62 | gaccctttg | 3127 | gctcctttg | 3299 | CAGCAGGTT | 3471 | GGGGGAGTG | 3643 |
| | ctcctttca | | ttccgcata | | AGGGTGGGA | | AGTGAAAGG | |
| | ca | | ag | | AG | | TG | |
| saM63 | gaccctttg | 3128 | gctcctttg | 3300 | AGCTCAATT | 3472 | CAGCAGGTT | 3644 |
| | ctcctttca | | ttccgcata | | GATCCGCCC | | AGGGTGGGA | |
| | ca | | ag | | AA | | AG | |
| saM64 | gaccctttg | 3129 | gctcctttg | 3301 | AGCTCAATT | 3473 | CAGCAGGTT | 3645 |
| | ctcctttca | | ttccgcata | | GATCCGCCC | | AGGGTGGGA | |
| | ca | | ag | | AA | | AG | |
| saM65 | gaccctttg | 3130 | gctcctttg | 3302 | AGCTCAATT | 3474 | TTGACTCCA | 3646 |
| | ctcctttca | | ttccgcata | | GATCCGCCC | | AAGCAAGGC | |
| | ca | | ag | | AA | | CA | |
| saM66 | gaccctttg | 3131 | gctcctttg | 3303 | AGCTCAATT | 3475 | TTGACTCCA | 3647 |
| | ctcctttca | | ttccgcata | | GATCCGCCC | | AAGCAAGGC | |
| | ca | | ag | | AA | | CA | |
| saM67 | gaccctttg | 3132 | gctcctttg | 3304 | AGCTCAATT | 3476 | TTGACTCCA | 3648 |
| | ctcctttca | | ttccgcata | | GATCCGCCC | | AAGCAAGGC | |
| | ca | | ag | | AA | | CA | |
| saM68 | gaccctttg | 3133 | gctcctttg | 3305 | AGCTCAATT | 3477 | AAAGAACAC | 3649 |
| | ctcctttca | | ttccgcata | | GATCCGCCC | | CTGGAGGAG | |
| | ca | | ag | | AA | | CG | |
| saM69 | gaccctttg | 3134 | gctcctttg | 3306 | AGCTCAATT | 3478 | AAAGAACAC | 3650 |
| | ctcctttca | | ttccgcata | | GATCCGCCC | | CTGGAGGAG | |
| | ca | | ag | | AA | | CG | |
| saM70 | gaccctttg | 3135 | gctcctttg | 3307 | AAAGAACAC | 3479 | AGCTCAATT | 3651 |
| | ctcctttca | | ttccgcata | | CTGGAGGAG | | GATCCGCCC | |
| | ca | | ag | | CG | | AA | |
| saM71 | gaccctttg | 3136 | gctcctttg | 3308 | AAAGAACAC | 3480 | AGCTCAATT | 3652 |
| | ctcctttca | | ttccgcata | | CTGGAGGAG | | GATCCGCCC | |
| | ca | | ag | | CG | | AA | |
| saM72 | gaccctttg | 3137 | gctcctttg | 3309 | AAAGAACAC | 3481 | AGCTCAATT | 3653 |
| | ctcctttca | | ttccgcata | | CTGGAGGAG | | GATCCGCCC | |
| | ca | | ag | | CG | | AA | |
| saM73 | gaccctttg | 3138 | gctcctttg | 3310 | AAAGAACAC | 3482 | AGCTCAATT | 3654 |
| | ctcctttca | | ttccgcata | | CTGGAGGAG | | GATCCGCCC | |
| | ca | | ag | | CG | | AA | |
| saM74 | gaccctttg | 3139 | gctcctttg | 3311 | AAAGAACAC | 3483 | AGCTCAATT | 3655 |
| | ctcctttca | | ttccgcata | | CTGGAGGAG | | GATCCGCCC | |
| | ca | | ag | | CG | | AA | |
| saM75 | gaccctttg | 3140 | gctcctttg | 3312 | AAAGAACAC | 3484 | AGCTCAATT | 3656 |
| | ctcctttca | | ttccgcata | | CTGGAGGAG | | GATCCGCCC | |
| | ca | | ag | | CG | | AA | |
| saM76 | gaccctttg | 3141 | gctcctttg | 3313 | AAAGAACAC | 3485 | AGCTCAATT | 3657 |
| | ctcctttca | | ttccgcata | | CTGGAGGAG | | GATCCGCCC | |
| | ca | | ag | | CG | | AA | |
| saM77 | gaccctttg | 3142 | gctcctttg | 3314 | ACAGAGTGG | 3486 | CCCACCCCT | 3658 |
| | ctcctttca | | ttccgcata | | GCAACTTCA | | CAGATTCCC | |
| | ca | | ag | | GG | | TA | |
| saM78 | gagagctgg | 3143 | catgttcac | 3315 | CCCTCGGGT | 3487 | CCCACCCCT | 3659 |
| | agttcatga | | caaccagat | | ACTCAGACT | | CAGATTCCC | |
| | agg | | ag | | CA | | TA | |
| saM79 | gagagctgg | 3144 | catgttcac | 3316 | CCCTCGGGT | 3488 | CCCACCCCT | 3660 |
| | agttcatga | | caaccagat | | ACTCAGACT | | CAGATTCCC | |
| | agg | | gc | | CA | | TA | |
| saM80 | gagagctgg | 3145 | catgttcac | 3317 | CCCTCGGGT | 3489 | CCCACCCCT | 3661 |
| | agttcatga | | caaccagat | | ACTCAGACT | | CAGATTCCC | |
| | agg | | gc | | CA | | TA | |
| saM81 | gagagctgg | 3146 | catgttcac | 3318 | CCCTCGGGT | 3490 | ACTCCCACC | 3662 |
| | agttcatga | | caaccagat | | ACTCAGACT | | CATCCTACC | |
| | agg | | gc | | CA | | TC | |
| saM82 | gagagctgg | 3147 | catgttcac | 3319 | CCCTCGGGT | 3491 | ACTCCCACC | 3663 |
| | agttcatga | | caaccagat | | ACTCAGACT | | CATCCTACC | |
| | agg | | gc | | CA | | TC | |
| saM83 | gagagctgg | 3148 | catgttcac | 3320 | CCCTCGGGT | 3492 | CCTGGCGAC | 3664 |
| | agttcatga | | caaccagat | | ACTCAGACT | | AAAACCCCT | |
| | agg | | gc | | CA | | AT | |
| saM84 | gagagctgg | 3149 | catgttcac | 3321 | CCTGGCGAC | 3493 | CCCTCGGGT | 3665 |
| | agttcatga | | caaccagat | | AAAACCCCT | | ACTCAGACT | |
| | agg | | gc | | AT | | CA | |
| saM85 | gagagctgg | 3150 | catgttcac | 3322 | CAGCTGCTG | 3494 | CCCTCGGGT | 3666 |
| | agttcatga | | caaccagat | | TTTCCTCAG | | ACTCAGACT | |
| | agg | | gc | | GA | | CA | |
| saM86 | gagagctgg | 3151 | catgttcac | 3323 | CAGCTGCTG | 3495 | CCCTCGGGT | 3667 |
| | agttcatga | | caaccagat | | TTTCCTCAG | | ACTCAGACT | |
| | agg | | gc | | GA | | CA | |
| saM87 | gagagctgg | 3152 | catgttcac | 3324 | CAGCTGCTG | 3496 | CCCTCGGGT | 3668 |
| | agttcatga | | caaccagat | | TTTCCTCAG | | ACTCAGACT | |
| | agg | | gc | | GA | | CA | |
| saM88 | gagagctgg | 3153 | catgttcac | 3325 | CGACCTGTG | 3497 | CCCTCGGGT | 3669 |
| | agttcatga | | caaccagat | | TGAATCCAG | | ACTCAGACT | |
| | agg | | gc | | CT | | CA | |
| saM89 | gagagctgg | 3154 | catgttcac | 3326 | CGACCTGTG | 3498 | CCCTCGGGT | 3670 |
| | agttcatga | | caaccagat | | TGAATCCAG | | ACTCAGACT | |
| | agg | | gc | | CT | | CA | |
| saM90 | gagagctgg | 3155 | catgttcac | 3327 | TACCTCCCT | 3499 | CTTCCCACC | 3671 |
| | agttcatga | | caaccagat | | CCACTTCTG | | CTAACCTGC | |
| | agg | | gc | | GG | | TG | |
| saM91 | gagagctgg | 3156 | catgttcac | 3328 | TACCTCCCT | 3500 | CTTCCCACC | 3672 |
| | agttcatga | | caaccagat | | CCACTTCTG | | CTAACCTGC | |
| | agg | | gc | | GG | | TG | |
| saM92 | gagagctgg | 3157 | catgttcac | 3329 | TACCTCCCT | 3501 | CTTCCCACC | 3673 |
| | agttcatga | | caaccagat | | CCACTTCTG | | CTAACCTGC | |
| | agg | | gc | | GG | | TG | |
| saM93 | gagagctgg | 3158 | catgttcac | 3330 | CGCTCCTCC | 3502 | TACCTCCCT | 3674 |
| | agttcatga | | caaccagat | | AGGTGTTCT | | CCACTTCTG | |
| | agg | | gc | | TT | | GG | |
| saM94 | gagagctgg | 3159 | catgttcac | 3331 | CGCTCCTCC | 3503 | TACCTCCCT | 3675 |
| | agttcatga | | caaccagat | | AGGTGTTCT | | CCACTTCTG | |
| | agg | | gc | | TT | | GG | |
| saM95 | gagagctgg | 3160 | catgttcac | 3332 | CCAGGTCCT | 3504 | CGCTCCTCC | 3676 |
| | agttcatga | | caaccagat | | CCATCTTCT | | AGGTGTTCT | |
| | agg | | gc | | GC | | TT | |
| saM96 | gagagctgg | 3161 | catgttcac | 3333 | TAGGGAATC | 3505 | CCCATGTTA | 3677 |
| | agttcatga | | caaccagat | | TGAGGGGTG | | CTGAGCCAC | |
| | agg | | gc | | GG | | GT | |
| saM97 | gagagctgg | 3162 | catgttcac | 3334 | TAGGGAATC | 3506 | CCCATGTTA | 3678 |
| | agttcatga | | caaccagat | | TGAGGGGTG | | CTGAGCCAC | |
| | agg | | gc | | GG | | GT | |
| saM98 | gagagctgg | 3163 | catgttcac | 3335 | TAGGGAATC | 3507 | CCCATGTTA | 3679 |
| | agttcatga | | caaccagat | | TGAGGGGTG | | CTGAGCCAC | |
| | agg | | gc | | GG | | GT | |
| saM99 | gagagctgg | 3164 | catgttcac | 3336 | TAGGGAATC | 3508 | CCCATGTTA | 3680 |
| | agttcatga | | caaccagat | | TGAGGGGTG | | CTGAGCCAC | |
| | agg | | gc | | GG | | GT | |
| saM100 | gagagctgg | 3165 | catgttcac | 3337 | TAGGGAATC | 3509 | CCCATGTTA | 3681 |
| | agttcatga | | caaccagat | | TGAGGGGTG | | CTGAGCCAC | |
| | agg | | gc | | GG | | GT | |
| saM101 | gagagctgg | 3166 | catgttcac | 3338 | TAGGGAATC | 3510 | CCCATGTTA | 3682 |
| | agttcatga | | caaccagat | | TGAGGGGTG | | CTGAGCCAC | |
| | agg | | gc | | GG | | GT | |
| saM102 | gagagctgg | 3167 | catgttcac | 3339 | TAGGGAATC | 3511 | TGAAGACCT | 3683 |
| | agttcatga | | caaccagat | | TGAGGGGTG | | GCAGCTTCC | |
| | agg | | gc | | GG | | TG | |
| saM103 | gagagctgg | 3168 | catgttcac | 3340 | TAGGGAATC | 3512 | TGAAGACCT | 3684 |
| | agttcatga | | caaccagat | | TGAGGGGTG | | GCAGCTTCC | |
| | agg | | gc | | GG | | TG | |
| saM104 | gagagctgg | 3169 | catgttcac | 3341 | TAGGGAATC | 3513 | TGAAGACCT | 3685 |
| | agttcatga | | caaccagat | | TGAGGGGTG | | GCAGCTTCC | |
| | agg | | gc | | GG | | TG | |
| saM105 | gagagctgg | 3170 | catgttcac | 3342 | TAGGGAATC | 3514 | TGAAGACCT | 3686 |
| | agttcatga | | caaccagat | | TGAGGGGTG | | GCAGCTTCC | |
| | agg | | gc | | GG | | TG | |
| saM106 | gagagctgg | 3171 | catgttcac | 3343 | TGAAGACCT | 3515 | TAGGGAATC | 3687 |
| | agttcatga | | caaccagat | | GCAGCTTCC | | TGAGGGGTG | |
| | agg | | gc | | TG | | GG | |
| saM107 | gagagctgg | 3172 | catgttcac | 3344 | TGAAGACCT | 3516 | TAGGGAATC | 3688 |
| | agttcatga | | caaccagat | | GCAGCTTCC | | TGAGGGGTG | |
| | agg | | gc | | TG | | GG | |
| saM108 | gagagctgg | 3173 | catgttcac | 3345 | CTGAGGAAA | 3517 | CGAGAGACC | 3689 |
| | agttcatga | | caaccagat | | CAGCAGCTG | | ATGAGCCCA | |
| | agg | | gc | | GA | | TC | |
| saM109 | gagagctgg | 3174 | catgttcac | 3346 | CTGAGGAAA | 3518 | CGAGAGACC | 3690 |
| | agttcatga | | caaccagat | | CAGCAGCTG | | ATGAGCCCA | |
| | agg | | gc | | GA | | TC | |
| saM110 | gagagctgg | 3175 | catgttcac | 3347 | CTGAGGAAA | 3519 | CGAGAGACC | 3691 |
| | agttcatga | | caaccagat | | CAGCAGCTG | | ATGAGCCCA | |
| | agg | | gc | | GA | | TC | |
| saM111 | gagagctgg | 3176 | catgttcac | 3348 | CGAGAGACC | 3520 | TGATGCTAC | 3692 |
| | agttcatga | | caaccagat | | ATGAGCCCA | | TTCTGCTGG | |
| | agg | | gc | | TC | | CC | |
| saM112 | gagagctgg | 3177 | catgttcac | 3349 | CGAGAGACC | 3521 | TGATGCTAC | 3693 |
| | agttcatga | | caaccagat | | ATGAGCCCA | | TTCTGCTGG | |
| | agg | | gc | | TC | | CC | |
| saM113 | gagagctgg | 3178 | catgttcac | 3350 | CGAGAGACC | 3522 | TGATGCTAC | 3694 |
| | agttcatga | | caaccagat | | ATGAGCCCA | | TTCTGCTGG | |
| | gagagctgg | | gc | | TC | | CC | |
| saM114 | gagagctgg | 3179 | catgttcac | 3351 | GCAACCCAT | 3523 | ACGTGGCTC | 3695 |
| | agttcatga | | caaccagat | | TAGCCCAGA | | AGTAACATG | |
| | agg | | gc | | CT | | GG | |
| saM115 | gagagctgg | 3180 | catgttcac | 3352 | GCAACCCAT | 3524 | ACGTGGCTC | 3696 |
| | agttcatga | | caaccagat | | TAGCCCAGA | | AGTAACATG | |
| | agg | | gc | | CT | | GG | |
| saM116 | gagagctgg | 3181 | catgttcac | 3353 | CAGGAAGCT | 3525 | GCAACCCAT | 3697 |
| | agttcatga | | caaccagat | | GCAGGTCTT | | TAGCCCAGA | |
| | agg | | gc | | CA | | CT | |
| saM117 | gagagctgg | 3182 | catgttcac | 3354 | CAGGAAGCT | 3526 | GGAAGCTAT | 3698 |
| | agttcatga | | caaccagat | | GCAGGTCTT | | ACCCACCAC | |
| | agg | | gc | | CA | | CG | |
| saM118 | gagagctgg | 3183 | catgttcac | 3355 | CAGGAAGCT | 3527 | CAGCCCAGA | 3699 |
| | agttcatga | | caaccagat | | GCAGGTCTT | | CATCCACAT | |
| | agg | | gc | | CA | | GT | |
| saM119 | gagagctgg | 3184 | catgttcac | 3356 | CAGGAAGCT | 3528 | CAGCCCAGA | 3700 |
| | agttcatga | | caaccagat | | GCAGGTCTT | | CATCCACAT | |
| | agg | | gc | | CA | | GT | |
| saM120 | gagagctgg | 3185 | catgttcac | 3357 | CAGGAAGCT | 3529 | CAGCCCAGA | 3701 |
| | agttcatga | | caaccagat | | GCAGGTCTT | | CATCCACAT | |
| | agg | | gc | | CA | | GT | |
| saM121 | gagagctgg | 3186 | catgttcac | 3358 | GACTGAGCC | 3530 | CAGCCCAGA | 3702 |
| | agttcatga | | caaccagat | | TGGGATTTG | | CATCCACAT | |
| | agg | | gc | | CT | | GT | |
| saM122 | gagagctgg | 3187 | catgttcac | 3359 | GACTGAGCC | 3531 | CAGCCCAGA | 3703 |
| | agttcatga | | caaccagat | | TGGGATTTG | | CATCCACAT | |
| | agg | | gc | | CT | | GT | |
| saM123 | gagagctgg | 3188 | catgttcac | 3360 | GACTGAGCC | 3532 | CAGCCCAGA | 3704 |
| | agttcatga | | caaccagat | | TGGGATTTG | | CATCCACAT | |
| | agg | | gc | | CT | | GT | |
| saM124 | gagagctgg | 3189 | catgttcac | 3361 | GATGGGCTC | 3533 | CAGCCCAGA | 3705 |
| | agttcatga | | caaccagat | | ATGGTCTCT | | CATCCACAT | |
| | agg | | gc | | CG | | GT | |
| saM125 | gagagctgg | 3190 | catgttcac | 3362 | GATGGGCTC | 3534 | CAGCCCAGA | 3706 |
| | agttcatga | | caaccagat | | ATGGTCTCT | | CATCCACAT | |
| | agg | | gc | | CG | | GT | |
| saM126 | gagagctgg | 3191 | catgttcac | 3363 | GATGGGCTC | 3535 | CAAGGTGCT | 3707 |
| | agttcatga | | caaccagat | | ATGGTCTCT | | GAGAGCCAA | |
| | agg | | gc | | CG | | GA | |
| saM127 | ggtgctgtt | 3192 | caggagcgc | 3364 | CAAGGTGCT | 3536 | GATGGGCTC | 3708 |
| | cccatgctt | | tttgaaaga | | GAGAGCCAA | | ATGGTCTCT | |
| | tg | | ca | | GA | | CG | |
| saM128 | ggtgctgtt | 3193 | caggagcgc | 3365 | GGTCTCGAG | 3537 | GATGGGCTC | 3709 |
| | cccatgctt | | tttgaaaga | | GTTGTCACT | | ATGGTCTCT | |
| | tg | | ca | | GG | | CG | |
| saM129 | ggtgctgtt | 3194 | caggagcgc | 3366 | GGTCTCGAG | 3538 | GATGGGCTC | 3710 |
| | cccatgctt | | tttgaaaga | | GTTGTCACT | | ATGGTCTCT | |
| | tg | | ca | | GG | | CG | |
| saM130 | ggtgctgtt | 3195 | caggagcgc | 3367 | GGTCTCGAG | 3539 | GATGGGCTC | 3711 |
| | cccatgctt | | tttgaaaga | | GTTGTCACT | | ATGGTCTCT | |
| | tg | | ca | | GG | | CG | |
| saM131 | ggtgctgtt | 3196 | caggagcgc | 3368 | GGTCTCGAG | 3540 | GATGGGCTC | 3712 |
| | cccatgctt | | tttgaaaga | | GTTGTCACT | | ATGGTCTCT | |
| | tg | | ca | | GG | | CG | |
| saM132 | ggtgctgtt | 3197 | caggagcgc | 3369 | GGTCTCGAG | 3541 | GATGGGCTC | 3713 |
| | cccatgctt | | tttgaaaga | | GTTGTCACT | | ATGGTCTCT | |
| | tg | | ca | | GG | | CG | |
| saM133 | ggtgctgtt | 3198 | caggagcgc | 3370 | AGTCTGGGC | 3542 | TCACCAGTT | 3714 |
| | cccatgctt | | tttgaaaga | | TAATGGGTT | | CTGTGGGCA | |
| | tg | | ca | | GC | | TC | |
| saM134 | ggtgctgtt | 3199 | caggagcgc | 3371 | AGTCTGGGC | 3543 | GCCATGAGG | 3715 |
| | cccatgctt | | tttgaaaga | | TAATGGGTT | | TTCAGCTCA | |
| | tg | | ca | | GC | | CT | |
| saM135 | ggtgctgtt | 3200 | caggagcgc | 3372 | AGTCTGGGC | 3544 | GCCATGAGG | 3716 |
| | cccatgctt | | tttgaaaga | | TAATGGGTT | | TTCAGCTCA | |
| | tg | | ca | | GC | | CT | |
| saM136 | ggtgctgtt | 2001 | caggagcgc | 3373 | AGTCTGGGC | 3545 | GCCATGAGG | 3717 |
| | cccatgctt | | tttgaaaga | | TAATGGGTT | | TTCAGCTCA | |
| | tg | | ca | | GC | | CT | |
| saM137 | ggtgctgtt | 2002 | caggagcgc | 3374 | CATGTGGAT | 3546 | AGCAGCTGG | 3718 |
| | cccatgctt | | tttgaaaga | | GTCTGGGCT | | TCCATTTAC | |
| | tg | | ca | | GT | | CC | |
| saM138 | ggtgctgtt | 2003 | caggagcgc | 3375 | CATGTGGAT | 3547 | AGCAGCTGG | 3719 |
| | cccatgctt | | tttgaaaga | | GTCTGGGCT | | TCCATTTAC | |
| | tg | | ca | | GT | | CC | |
| saM139 | ggtgctgtt | 2004 | caggagcgc | 3376 | CATGTGGAT | 3548 | AGCAGCTGG | 3720 |
| | cccatgctt | | tttgaaaga | | GTCTGGGCT | | TCCATTTAC | |
| | tg | | ca | | GT | | CC | |
| saM140 | ggtgctgtt | 2005 | caggagcgc | 3377 | CATGTGGAT | 3549 | AGCAGCTGG | 3721 |
| | cccatgctt | | tttgaaaga | | GTCTGGGCT | | TCCATTTAC | |
| | tg | | ca | | GT | | CC | |
| saM141 | ggtgctgtt | 2006 | caggagcgc | 3378 | CATGTGGAT | 3550 | AGCAGCTGG | 3722 |
| | cccatgctt | | tttgaaaga | | GTCTGGGCT | | TCCATTTAC | |
| | tg | | ca | | GT | | CC | |
| saM142 | ggtgctgtt | 2007 | caggagcgc | 3379 | CATGTGGAT | 3551 | AGCAGCTGG | 3723 |
| | cccatgctt | | tttgaaaga | | GTCTGGGCT | | TCCATTTAC | |
| | tg | | ca | | GT | | CC | |
| saM143 | ggtgctgtt | 2008 | caggagcgc | 3380 | CATGTGGAT | 3552 | AGCAGCTGG | 3724 |
| | cccatgctt | | tttgaaaga | | GTCTGGGCT | | TCCATTTAC | |
| | tg | | ca | | GT | | CC | |
| saM144 | ggtgctgtt | 2009 | caggagcgc | 3381 | AGCAGCTGG | 3553 | CATGTGGAT | 3725 |
| | cccatgctt | | tttgaaaga | | TCCATTTAC | | GTCTGGGCT | |
| | tg | | ca | | CC | | GT | |
| saM145 | ggtgctgtt | 2010 | caggagcgc | 3382 | GAGGTGAGC | 3554 | CATGTGGAT | 3726 |
| | cccatgctt | | tttgaaaga | | AGAGCTTCC | | GTCTGGGCT | |
| | tg | | ca | | TG | | GT | |
| saM146 | ggtgctgtt | 2011 | caggagcgc | 3383 | TTAGTTGGG | 3555 | CATGTGGAT | 3727 |
| | cccatgctt | | tttgaaaga | | CTTGGTGGG | | GTCTGGGCT | |
| | tg | | ca | | AC | | GT | |
| saM147 | ggtgctgtt | 2012 | caggagcgc | 3384 | TTAGTTGGG | 3556 | CATGTGGAT | 3728 |
| | cccatgctt | | tttgaaaga | | CTTGGTGGG | | GTCTGGGCT | |
| | tg | | ca | | AC | | GT | |
| saM148 | ggtgctgtt | 2013 | caggagcgc | 3385 | TTAGTTGGG | 3557 | CATGTGGAT | 3729 |
| | cccatgctt | | tttgaaaga | | CTTGGTGGG | | GTCTGGGCT | |
| | tg | | ca | | AC | | GT | |
| saM149 | ggtgctgtt | 2014 | caggagcgc | 3386 | GATGCCCAC | 3558 | CTCTGTACT | 3730 |
| | cccatgctt | | tttgaaaga | | AGAACTGGT | | CAGGGTGCT | |
| | tg | | ca | | GA | | GC | |
| saM150 | ggtgctgtt | 2015 | caggagcgc | 3387 | GATGCCCAC | 3559 | CTCTGTACT | 3731 |
| | cccatgctt | | tttgaaaga | | AGAACTGGT | | CAGGGTGCT | |
| | tg | | ca | | GA | | GC | |
| saM151 | ggtgctgtt | 2016 | caggagcgc | 3388 | GATGCCCAC | 3560 | CTCTGTACT | 3732 |
| | cccatgctt | | tttgaaaga | | AGAACTGGT | | CAGGGTGCT | |
| | tg | | ca | | GA | | GC | |
| saM152 | ggtgctgtt | 2017 | caggagcgc | 3389 | GATGCCCAC | 3561 | CTCTGTACT | 3733 |
| | cccatgctt | | tttgaaaga | | AGAACTGGT | | CAGGGTGCT | |
| | tg | | ca | | GA | | GC | |
| saM153 | ggtgctgtt | 2018 | caggagcgc | 3390 | AGTGAGCTG | 3562 | CTCTGTACT | 3734 |
| | cccatgctt | | tttgaaaga | | AACCTCATG | | CAGGGTGCT | |
| | tg | | ca | | GC | | GC | |
| saM154 | ggtgctgtt | 2019 | caggagcgc | 3391 | GTTCGAGAC | 3563 | GGGTAAATG | 3735 |
| | cccatgctt | | tttgaaaga | | CAGCCTCAA | | GACCAGCTG | |
| | tg | | ca | | CA | | CT | |
| saM155 | ggtgctgtt | 2020 | caggagcgc | 3392 | GTTCGAGAC | 3564 | GGGTAAATG | 3736 |
| | cccatgctt | | tttgaaaga | | CAGCCTCAA | | GACCAGCTG | |
| | tg | | ca | | CA | | CT | |
| saM156 | ggtgctgtt | 2021 | caggagcgc | 3393 | GTTCGAGAC | 3565 | GGGTAAATG | 3737 |
| | cccatgctt | | tttgaaaga | | CAGCCTCAA | | GACCAGCTG | |
| | tg | | ca | | CA | | CT | |
| saM157 | ggtgctgtt | 2022 | caggagcgc | 3394 | GTTCGAGAC | 3566 | GGGTAAATG | 3738 |
| | cccatgctt | | tttgaaaga | | CAGCCTCAA | | GACCAGCTG | |
| | tg | | ca | | CA | | CT | |
| saM158 | ctggaggga | 2023 | cccagtcag | 3395 | GGAGTCTGA | 3567 | TGTTGAGGC | 3739 |
| | agggttagc | | ccacaaaat | | GGTGGGAGG | | TGGTCTCGA | |
| | tc | | ca | | AT | | AC | |
| saM159 | ctggaggga | 2024 | cccagtcag | 3396 | GGAGTCTGA | 3568 | TGTTGAGGC | 3740 |
| | agggttagc | | ccacaaaat | | GGTGGGAGG | | TGGTCTCGA | |
| | tc | | ca | | AT | | AC | |
| saM160 | ctggaggga | 2025 | cccagtcag | 3397 | GGAGTCTGA | 3569 | TGTTGAGGC | 3741 |
| | agggttagc | | ccacaaaat | | GGTGGGAGG | | TGGTCTCGA | |
| | tc | | ca | | AT | | AC | |
| saM161 | ctggaggga | 2026 | cccagtcag | 3398 | GGAGTCTGA | 3570 | TGTTGAGGC | 3742 |
| | agggttagc | | ccacaaaat | | GGTGGGAGG | | TGGTCTCGA | |
| | tc | | ca | | AT | | AC | |
| saM162 | ctggaggga | 2027 | cccagtcag | 3399 | TGCGCCTGG | 3571 | CAGGTGATT | 3743 |
| | agggttagc | | ccacaaaat | | CTAATTTGT | | TTGCCCAAC | |
| | tc | | ca | | TG | | CG | |
| saM163 | ctggaggga | 2028 | cccagtcag | 3400 | TCCCTGTCT | 3572 | CAGGTGATT | 3744 |
| | agggttagc | | ccacaaaat | | TTCAAAGCG | | TTGCCCAAC | |
| | tc | | ca | | CT | | CG | |
| saM164 | ctggaggga | 2029 | cccagtcag | 3401 | ATTGTTCCG | 3573 | CAGTGCCAG | 3745 |
| | agggttagc | | ccacaaaat | | TGGGTGGAG | | CAAGACTAG | |
| | tc | | ca | | TC | | CT | |
| saM165 | ctggaggga | 2030 | cccagtcag | 3402 | ATTGTTCCG | 3574 | CAGTGCCAG | 3746 |
| | agggttagc | | ccacaaaat | | TGGGTGGAG | | CAAGACTAG | |
| | tc | | ca | | TC | | CT | |
| saM166 | ctggaggga | 2031 | cccagtcag | 3403 | CAGTGCCAG | 3575 | ATTGTTCCG | 3747 |
| | agggttagc | | ccacaaaat | | CAAGACTAG | | TGGGTGGAG | |
| | tc | | ca | | CT | | TC | |
| saM167 | ctggaggga | 2032 | cccagtcag | 3404 | GGTTGCAGT | 3576 | ATTGTTCCG | 3748 |
| | agggttagc | | ccacaaaat | | GAGCTGAGA | | TGGGTGGAG | |
| | tc | | ca | | CT | | TC | |
| saM168 | ctggaggga | 2033 | cccagtcag | 3405 | TGCCTGGTA | 3577 | CCCACTCAC | 3749 |
| | agggttagc | | ccacaaaat | | CACAGCAAA | | CATGGACAA | |
| | tc | | ca | | CA | | CA | |
| saM169 | ctggaggga | 2034 | cccagtcag | 3406 | TGCCTGGTA | 3578 | CCCACTCAC | 3750 |
| | agggttagc | | ccacaaaat | | CACAGCAAA | | CATGGACAA | |
| | tc | | ca | | CA | | CA | |
| saM170 | ctggaggga | 2035 | cccagtcag | 3407 | TGCCTGGTA | 3579 | CCCACTCAC | 3751 |
| | agggttagc | | ccacaaaat | | CACAGCAAA | | CATGGACAA | |
| | tc | | ca | | CA | | CA | |
| saM171 | ctggaggga | 2036 | cccagtcag | 3408 | TGCCTGGTA | 3580 | CCCACTCAC | 3752 |
| | agggttagc | | ccacaaaat | | CACAGCAAA | | CATGGACAA | |
| | tc | | ca | | CA | | CA | |
| saM172 | ctggaggga | 2037 | cccagtcag | 3409 | TGCCTGGTA | 3581 | GGGGAGTGG | 3753 |
| | agggttagc | | ccacaaaat | | CACAGCAAA | | CTAATGTGA | |
| | tc | | ca | | CA | | CC | |

ND = not detectable above assay threshold of detection

TABLE 30
SaCas9 sgRNAs Categorized Based on Cleavage Efficiency

| Total INDEL % | Guides |
|---|---|
| Not detectable above | SaM1, SaM2, SaM3, SaM4, SaM5, SaM6, SaM7, SaM70, SaM80, SaM81, |
| assay threshold of | SaM103, SaM133, SaM139, SaM148, SaM153, SaM154, SaM155, SaM156, |
| detection | SaM157, SaM158, SaM159, SaM160, SaM161, SaM171, SaM172 |
| <15% | SaM9, SaM11 SaM14, SaM18, SaM23, SaM24, SaM26, SaM28, SaM29, |
| | SaM30, SaM32, SaM33, SaM35, SaM36, SaM40, SaM48, SaM49, SaM50, |
| | SaM52, SaM55, SaM56, SaM57, SaM59, SaM60, SaM62, SaM63, SaM64, |
| | SaM65, SaM67, SaM68, SaM72, SaM75, SaM76, SaM77, SaM82, SaM84, |
| | SaM85, SaM90, SaM95, SaM98, SaM99, SaM100, SaM102, SaM106, |
| | SaM107, SaM108, SaM109, SaM110, SaM112, SaM113, SaM114, SaM115, |
| | SaM116, SaM117, SaM118, SaM119, SaM121, SaM125, SaM126, SaM134, |
| | SaM135, SaM137, SaM138, SaM140, SaM141, SaM142, SaM143, SaM144, |
| | SaM147, SaM163, SaM167, SaM168 |
| 15%-25% | SaM8, SaM12, SaM13, SaM15, SaM16, SaM19, SaM21, SaM22, SaM31 |
| | SaM37, SaM38, SaM39, SaM41, SaM42, SaM43, SaM44, SaM45, SaM47, |
| | SaM51, SaM53, SaM61, SaM66, SaM69, SaM73, SaM74, SaM78, SaM79, |
| | SaM83, SaM86, SaM93, SaM94, SaM96, SaM97, SaM104, SaM111, SaM120, |
| | SaM122, SaM123, SaM127, SaM128, SaM130, SaM131, SaM132, SaM146, |
| | SaM149, SaM150, SaM162, SaM164, SaM165, SaM166, SaM169, SaM170 |
| >25% | SaM10, SaM17, SaM20, SaM25, SaM27, SaM34, SaM46, SaM54, SaM58, |
| | SaM71, SaM88, SaM91, SaM92, SaM101, SaM105, SaM124, SaM129, |
| | SaM136, SaM145, SaM151, SaM152 |

[0597] A subset of the SaCas9 sgRNAs was selected for inducing a microdeletion in FAAH-OUT. Specifically, 12 SaCas9 sgRNAs with high overall INDEL frequency were selected as left gRNAs (SaM8, SaM10, SaM17, SaM20, SaM25, SaM27, SaM34, SaM38, SaM45, SaM46, SaM54, and SaM58); and 4 SaCas9 sgRNAs with high overall INDEL frequency were selected as right gRNAs (SaM124, SaM151, SaM165, and SaM170). The frequency of INDELs at predicted cut-sites measured for these guides is provided in Table 31.

TABLE 31
Left and Right SaCas9 sgRNAs Targeting FAAH-OUT

| sgRNA Name | Indel % | L/R* |
|---|---|---|
| SaM8 | 15.4 | L |
| SaM10 | 38.875 | L |
| SaM17 | 34.8 | L |
| SaM20 | 26.7 | L |
| SaM25 | 27.3 | L |
| SaM27 | 31 | L |
| SaM34 | 30.2 | L |
| SaM38 | 23.9 | L |
| SaM45 | 23.7 | L |
| SaM46 | 25.9 | L |
| SaM54 | 27.35 | L |
| SaM58 | 30.925 | L |
| SaM124 | 32.45 | R |
| SaM151 | 40.9 | R |
| SaM165 | 23.05 | R |
| SaM170 | 24.3 | R |

*denotes Left (L) or Right (R) gRNA

[0598] Combinations of SaCas9 sgRNAs identified in Table 32 were evaluated for inducing a microdeletion in FAAH-OUT. Briefly, 0.2×10⁶ MCF7 cells were electroporated with a left and right SaCas9 sgRNA (1.6 μg per each) and 3 μg SaCas9 protein (SEQ ID NO: 1272). The cells were incubated 48-72 hours following electroporation, then harvested. Genomic DNA was extracted for quantification of a deletion in FAAH-OUT by ddPCR as described in Example 6. As shown in FIG. 8A, the majority of sgRNA pairs evaluated resulted in frequency of deletion of FAAH-OUT that exceeded 40%. Quantification of deletion for each sgRNA combination is provided in Table 32.

[0599] Edited MCF7 cells were further harvested for RNA extraction and quantification of FAAH mRNA by qPCR as described in Example 2. As shown in FIG. 8B, the FAAH mRNA levels in treated cells, measured as fold change relative to control cells electroporated with SaCas9 only using the 2\hat{ }(−ddCt) method, were reduced by 20% or more for most of the sgRNA combinations tested. Quantification of fold change is provided in Table 32.

TABLE 32
Left and Right SaCas9 sgRNAs Targeting FAAH-OUT

| | Avg deletion | mRNA Fold |
|---|---|---|
| gRNA ID | (%) | Change |
| 1-SaM8/124 | 48.6456 | 0.571958 |
| 2-SaM10/124 | 48.4926 | 0.579198 |
| 3-SaM17/124 | 49.5368 | 0.636002 |
| 4-SaM20/124 | 56.9462 | 0.687604 |
| 5-SaM25/124 | 42.7308 | 0.831251 |
| 6-SaM27/124 | 44.9926 | 0.60729 |
| 7-SaM34/124 | 59.4875 | 0.683977 |
| 8-SaM38/124 | 53.1112 | 0.543927 |
| 9-SaM45/124 | 47.7424 | 0.628248 |
| 10-SaM46/124 | 50.0413 | 0.720223 |
| 11-SaM54/124 | 49.1768 | 0.685975 |
| 12-SaM58/124 | 51.5117 | 0.623613 |
| 13-SaM8/151 | 53.7392 | 0.59501 |
| 14-SaM10/151 | 64.0011 | 0.434573 |
| 15-SaM17/151 | 49.9067 | 0.723646 |
| 16-SaM20/151 | 52.447 | 0.614436 |
| 17-SaM25/151 | 49.8748 | 0.781345 |
| 18-SaM27/151 | 53.0009 | 0.684715 |
| 19-SaM34/151 | 52.4106 | 0.624151 |
| 20-SaM38/151 | 53.2814 | 0.553493 |
| 21-SaM45/151 | 53.9365 | 0.580466 |
| 22-SaM46/151 | 53.4233 | 0.511456 |
| 23-SaM54/151 | 53.104 | 0.750226 |
| 24-SaM58/151 | 56.5762 | 0.723851 |
| 25-SaM8/165 | 33.3402 | 0.681418 |
| 26-SaM10/165 | 38.0323 | 0.800786 |
| 27-SaM17/165 | 35.2796 | 1.074426 |
| 28-SaM20/165 | 35.0252 | 0.846318 |
| 29-SaM25/165 | 32.1994 | 0.845465 |
| 30-SaM27/165 | 35.1626 | 1.016445 |
| 31-SaM34/165 | 33.656 | 0.529662 |
| 32-SaM38/165 | 35.7047 | 0.658315 |
| 33-SaM45/165 | 36.1621 | 0.398656 |
| 34-SaM46/165 | 36.0589 | 0.617158 |
| 35-SaM54/165 | 36.8695 | 0.618408 |
| 36-SaM58/165 | 37.2224 | 0.536667 |
| 37-SaM8/170 | 26.6475 | 0.663469 |
| 38-SaM10/170 | 25.7974 | 0.983808 |
| 39-SaM17/170 | 26.7748 | 1.003524 |
| 40-SaM20/170 | 30.0636 | 1.01508 |
| 41-SaM25/170 | 27.0519 | 1.076097 |
| 42-SaM27/170 | 29.4293 | 0.976224 |
| 43-SaM34/170 | 31.2281 | 0.782584 |
| 44-SaM38/170 | 30.4027 | 0.713765 |
| 45-SaM45/170 | 32.9118 | 0.433929 |
| 46-SaM46/170 | 32.7716 | 0.272587 |
| 47-SaM54/170 | 31.6828 | 0.345486 |
| 48-SaM58/170 | 33.6818 | 0.29687 |

* control = 1.000

### Example 9: Evaluation of In Vitro Gene Editing and Functional Activity of gRNA/SpCas9 and sgRNA/SaCas9 Targeting the FAAH Coding Sequence Using AAV as Delivery System

[0600] A subset of SpCas9 and SaCas9 sgRNAs (Table 33) were selected for further evaluation using AAV vectors expressing SpCas9 or SaCas9 and sgRNAs. The vector transduced cells were monitored for indels (TIDE) at the predicted cut site, levels of FAAH mRNA, and FAAH protein. The binding sites for SpCas9 sgRNAs SpCh29, SpCh30, SpCh31, SpCh32 and SpCh34 are located in FAAH exon 2, and for SaCas9 sgRNAs SaCh1, SaCh7, SaCh11, SaCh1 and SaCh13 are located within or outside of FAAH exons 1, 2 and 4.

TABLE 33
Target Sequences for SpCas9 and SaCas9 sgRNAs in
the FAAH Coding Sequence

| | Target Sequence | SEQ | Cut site |
|---|---|---|---|
| Name | PAM in bold underline | ID NO | Location* |
| SpCh29 | GGTGAAGAGCACGGCCTCAGGGG | 29 | 46402176 |
| SpCh30 | GGCCGTGCTCTTCACCTATGTGG | 30 | 46402193 |
| SpCh31 | GCCGTGCTCTTCACCTATGTGGG | 31 | 46402194 |
| SpCh32 | TCCCACATAGGTGAAGAGCACGG | 32 | 46402185 |
| SpCh34 | TGGCCTTACCTTTCCCACATAGG | 34 | 46402197 |
| SaCh1 | TGGGATCCCGGCTGATCCAGTCCGGGT | 149 | 46394264 |
| SaCh7 | GCAGCGCCTCTGAGTCCAGGTCTGGGT | 155 | 46402101 |
| SaCh11 | CATTCAGGCTCAAGCCCAGCGTGGAGT | 159 | 46405388 |
| SaCh12 | GCTGGGCTTGAGCCTGAATGAAGGGGT | 160 | 46405403 |
| SaCh13 | GCCTGAATGAAGGGGTOCCGGCGGAGT | 161 | 46405414 |

*Chromosomal location of guide cut-site in chromosome 1 of human genome Hg38

[0601] For SpCas9, all-in-two AAV vectors and for SaCas9, all-in-one vectors were used. To generate AAV-SpCas9 vector, the coding sequence (SEQ ID NO: 3756) under the transcription control of truncated CMV promoter (SEQ ID NO: 3758) was cloned into AAV vector plasmid. SpCas9 sgRNA encoding DNA sequences (Table 33) under the control of U6 promoter (SEQ ID NO: 3756) were cloned into a separate AAV vector plasmid (Table 34). For SaCas9 system, Cas9 expression was placed under the control of CMV promoter (SEQ ID NO: 3759) and sgRNA expression under the control of a U6 promoter (SEQ ID NO: 3756). Spacer and tcrRNA sequences used are shown in Tables 33 and 34. The DNA sequences in the vector constructs were verified by nucleotide sequence determination prior to generation of vectors. AAV vector titers were determined by qPCR.

TABLE 34
Sequences of SpCas9 and SaCas9 tcrRNA sequences used in
AAV plasmid backbones.

| Name | tcrRNA sequences included in AAV plasmid sequences | SEQ ID NO |
|---|---|---|
| Sp | GTTTCAGAGCTATGCTGGAAACAGCATAGCAAGTTGAAATAAGG | 3754 |
| tcrRNA | CTAGTCCGTTATCAACTTGAAAAAGTGGCACCGAGTCGGTGCT | |
| Sa | GTTTAAGTACTCTGTGCTGGAAACAGCACAGAATCTACTTAAA | 3755 |
| tcrRNA | CAAGGCAAAATGCCGTGTTTATCTCGTCAACTTGTTGGCGAGA | |

[0602] MCF7 cells were used for transduction experiments as described below. Briefly, 1×10⁵ MCF7 cells were resuspended in 100 ul of Opti-MEM media (ThermoFisher Scientific) and incubated for 20 minutes at 37° C., 5% CO₂ with single (SaCas9-sgRNA) or dual (SpCas9 and U6-sgRNA) AAVs at a multiplicity of infection (MOI) of 50,000 in triplicates. The transduced cells were seeded into a 48-well plate and incubated for 96 hours. Thereafter, the genomic DNA was extracted and purified using a Quick DNA Kit (Zymo #D3011).

[0603] The frequency of INDELs induced at predicted cut sites in the genomic DNA was evaluated by TIDE analysis (see, e.g., Brinkman, et al (2014) NUCLEIC ACIDS RESEARCH 42:e168). Specifically, primers flanking the target site of each SpCas9 or SaCas9 sgRNA were used in a PCR reaction with 2 μL (40-70 ng) of genomic DNA to amplify a region 1 of 955 bp, region 2 of 759 bp, and region 4 of 932 bp flanking exon 1, 2 and 4 respectively, surrounding the predicted cut site of each sgRNA. The primers used for amplification corresponding to each SpCas9 and SaCas9 sgRNAs are identified in Table 35 and Table 36, respectively. The PCR product was purified using AMPure XP PCR Purification (Beckman Coulter #A63881) and Sanger sequencing (Genewiz) was performed using the sequencing primers identified in Table 35 and Table 36. The sequence data was analyzed using the Tsunami software to determine the frequency of INDELs at the predicted cut site for each sgRNA/SpCas9 or SaCas9 complex.

TABLE 35
PCR and TIDE Primer Sequences for Analysis of INDEL Frequency at
Cut Site Corresponding to SpCas9 sgRNAs

| | | SEQ | | SEQ | Sequencing | SEQ |
|---|---|---|---|---|---|---|
| sgRNA | PCR primer 1 | ID NO | PCR primer 2 | ID NO | primer | ID NO |
| SpCh29 | CATCAGTCTGGAGCT | 1319 | AGACCAGACTTGTTG | 1353 | AGCATGTGCCTGTAG | 1387 |
| | AGGCA | | CCCAA | | TTC | |
| SpCh30 | CATCAGTCTGGAGCT | 1320 | AGACCAGACTTGTTG | 1354 | AGCATGTGCCTGTAG | 1388 |
| | AGGCA | | CCCAA | | TTC | |
| SpCh31 | CATCAGTCTGGAGCT | 1321 | AGACCAGACTTGTTG | 1355 | AGCATGTGCCTGTAG | 1389 |
| | AGGCA | | CCCAA | | TTC | |
| SpCh32 | CATCAGTCTGGAGCT | 1322 | AGACCAGACTTGTTG | 1356 | AGCATGTGCCTGTAG | 1390 |
| | AGGCA | | CCCAA | | TTC | |
| SpCh34 | CATCAGTCTGGAGCT | 1324 | AGACCAGACTTGTTG | 1358 | AGCATGTGCCTGTAG | 1392 |
| | AGGCA | | CCCAA | | TTC | |

TABLE 36

PCR and TIDE Primer Sequences for Analysis ofINDEL Frequency at Cut Site Corresponding
to SaCas9 sgRNAs

| | PCR | SEQ | PCR | SEQ | Sequencing | SEQ | Sequencing | SEQ | Sequencing | SEQ |
|---|---|---|---|---|---|---|---|---|---|---|
| sgRNA | primer 1 | ID NO | primer 2 | ID NO | primer 1 | ID NO | primer 2 | ID NO | primer 3 | ID NO |
| SaCh1 | TCTAACAG | 1513 | AAGCTCT | 1529 | TCTAACA | 1545 | AAGCTCT | 1561 | CACTACG | 1577 |
| | CTGGCATG | | CCAGATC | | GCTGGCA | | CCAGATC | | CTCCGGC | |
| | TCTG | | CCCTTG | | TGTCTG | | CCCTTG | | AGTCACC | |
| SaCh7 | CATCAGTC | 1519 | AGACCAG | 1535 | CATCAGT | 1551 | AGACCAG | 1567 | AGACCAG | 1567 |
| | TGGAGCTA | | ACTTGTT | | CTGGAGC | | ACTTGTT | | ACTTGTT | |
| | GGCA | | GCCCAA | | TAGGCA | | GCCCAA | | GCCCAA | |
| SaCh11 | GACCAACT | 1523 | TCTGAAC | 1539 | GACCAAC | 1555 | TCTGAAC | 1571 | ACCTACA | 1584 |
| | GTGTGACC | | ACTCACC | | TGTGTGA | | ACTCACC | | AGGTATG | |
| | TCCT | | GCTTTG | | CCTCCT | | GCTTTG | | CTCTGC | |
| SaCh12 | GACCAACT | 1524 | TCTGAAC | 1540 | GACCAAC | 1556 | TCTGAAC | 1572 | ACCTACA | 1585 |
| | GTGTGACC | | ACTCACC | | TGTGTGA | | ACTCACC | | AGGTATG | |
| | TCCT | | GCTTTG | | CCTCCT | | GCTTTG | | CTCTGC | |
| SCh13 | GACCAACT | 1525 | TCTGAAC | 1541 | GACCAAC | 1557 | TCTGAAC | 1573 | ACCTACA | 1586 |
| | GTGTGACC | | ACTCACC | | TGTGTGA | | ACTCACC | | AGGTATG | |
| | TCCT | | GCTTTG | | CCTCCT | | GCTTTG | | CTCTGC | |

[0604] The overall INDEL frequency at the predicted cut sites for each sgRNA is provided in Table 37 and in FIG. 9A. The INDELs resulting in an in-frame mutation (i.e., ±3 nt, ±6 nt, ±9 nt, etc.) were removed to provide the percentage of INDELs expected to produce a frameshift mutation (i.e., ±1 nt, ±2 nt, ±4 nt, etc), is also shown in Table 37. The sgRNA SaCh1 having cut sites outside the exon 1 region of FAAH is shown by asterisk. As a frameshift mutation for these guides is not applicable, the value represented by “frameshift INDELs” refers to the frequency of total INDELs minus the frequency of INDELs that are divisible by 3 (e.g., ±3 nt, ±6 nt, ±9 nt, etc).

[0605] To determine FAAH mRNA levels post-editing total RNA was extracted from the cells and subjected to quantitative PCR (qPCR) assay. Specifically, RNA extraction was performed using a Quick-RNA 96 Kit (Zymo Research, #R1052). RNA concentration was measured by DropSense (Trinean) and 250 ng RNA was used for reverse transcription using a QuantiTect Reverse Transcription kit (Qiagen #205311) to prepare cDNA. Subsequently, 40 ng of cDNA was used for qPCR to measure FAAH mRNA levels. For qPCR quantification, TaqMan Fast Advanced Master Mix (ThermoFisher #4444557) was combined with the reagents below. TBP (ThermoFisher #4331182) mRNA levels were used as qPCR internal controls.

(SEQ ID NO: 1273)
Forward primer: TGATATCGGAGGCAGCATCC;
(SEQ ID NO: 1274)
Reverse primer: CTTCAGGCCACTCTTGCTGA ; and
(SEQ ID NO: 1275)
Probe: CTTCCCCTCCTCCTTCTGC.

[0606] FAAH mRNA levels were quantified as a fold change between an edited sample and an untreated control sample subjected to electroporation without CRISPR/Cas9 components. Fold change was calculated using the 2\hat{ }(−ddCt) method and is provided for each sgRNA in Table 37 and in FIG. 9B. Most sgRNA achieved at least a 50% reduction in FAAH mRNA levels, with SaCh11, SaCh12, SpCh29, SpCh32 and SpCh34 sgRNAs producing the greatest reduction.

TABLE 37
Quantification of Editing Efficiency and Functional Activity
of SpCas9 sgRNAs Targeting FAAH Coding Sequence

| sgRNA | Indel (%) | | FAAH mRNA | FAAH protein |
|---|---|---|---|---|
| Name | Total | Frameshift* | (fold change) | (FAAH:GAPDH) |
| SpCh29 | 80.4 | 66.4 | 0.602 | 0.545 |
| SpCh30 | 48.7 | 44.7 | 0.642 | 0.557 |
| SpCh31 | 59 | 49.0 | 0.881 | 0.349 |
| SpCh32 | 63.6 | 58.2 | 0.570 | 0.424 |
| SpCh34 | 64.18 | 55.8 | 0.499 | 0.335 |
| SaCh1 | 25.2 | 20.2 | 0.655 | 0.609 |
| SaCh7 | 79.4 | 22.8 | 0.656 | 0.378 |
| SaCh11 | 41.5 | 31.3 | 0.407 | 0.411 |
| SaCh12 | 53.2 | 46.2 | 0.512 | 0.438 |
| SaCh13 | 45.2 | 36.7 | 1.02 | 0.576 |

*Frameshift INDEL % refers to INDELs expected to result in a frameshift mutation in the FAAH coding sequence (i.e., ±1 nt, ±2 nt, ±4 nt). The sgRNAs with values in underline have cut sites outside exon 1 of FAAH, wherein frameshift mutations are not applicable. Thus, Frameshift INDEL % refers to frequency of total INDELs minus frequency of INDELs that are ±3 nt, ±6 nt, ±9 nt, etc. All data entered are a mean of n = 3 replicates.

[0607] Edited MCF7 cells were also harvested for total protein extraction to quantify FAAH protein levels by Simple Wes. Protein extraction was performed using RIPA lysis and extraction buffer (ThermoFisher #89900). Subsequently, 0.5 μg of protein was loaded onto Simple Wes and analyzed using a target primary mouse anti-FAAH1 antibody (Abcam #ab54615; 1:25 dilution) and a housekeeping primary rabbit anti-GAPDH mAb 14C10 (CST #2118S; 1:25 dilution) in antibody diluent (ProteinSimple Anti-rabbit and anti-mouse secondary antibody (ProteinSimple #DM-001; ProteinSimple DM-002) were mixed in equal parts for detection. The relative expression level of FAAH protein was compared to GAPDH as internal control. The relative expression level of FAAH protein was then normalized for samples treated with sgRNA/SpCas9 or sgRNA/SaCas9 to a untransduced (no virus) sample. Normalized FAAH protein levels following editing are provided in Table 37 and FIG. 9C. Several of the sgRNAs evaluated, including SpCh31, SpCh32, SpCh34, SaCh7, SaCh11, and SaCh12, resulted in a reduction of FAAH protein expression of 50% or more.

| Name/ | | SEQ |
|---|---|---|
| Identifier | Sequence | ID NO |
| Sp sgRNA | mN*mN*mN*NNNNNNNNNNNNNNNNNGUUUUAGAGCUAGAAAUAGCAAGUUAAAAUAAGG | 1267 |
| backbone | CUAGUCCGUUAUCAACUUGAAAAAGUGGCACCGAGUCGGUmG*mC*mU* | |
| Spcas9 | MHHHHHHHHGSGGSGGSGPKKKRKVGSGGSGGSGKRNYILGLDIGITSV | 1268 |
| Polypeptide | GYGIIDYETRDVIDAGVRLFKEANVENNEGRRSKRGARRLKRRRRHRIQ | |
| | RVKKLLFDYNLLTDHSELSGINPYEARVKGLSQKLSEEEFSAALLHLAK | |
| | RRGVHNVNEVEEDTGNELSTKEQISRNSKALEEKYVAELQLERLKKDGE | |
| | VRGSINRFKTSDYVKEAKQLLKVQKAYHQLDQSFIDTYIDLLETRRTYY | |
| | EGPGEGSPFGWKDIKEWYEMLMGHCTYFPEELRSVKYAYNADLYNALND | |
| | LNNLVITRDENEKLEYYEKFQIIENVFKQKKKPTLKQIAKEILVNEEDI | |
| | KGYRVTSTGKPEFTNLKVYHDIKDITARKEIIENAELLDQIAKILTIYQ | |
| | SSEDIQEELTNLNSELTQEEIEQISNLKGYTGTHNLSLKAINLILDELW | |
| | HTNDNQIAIFNRLKLVPKKVDLSQQKEIPTTLVDDFILSPVVKRSFIQS | |
| | IKVINAIIKKYGLPNDIIIELAREKNSKDAQKMINEMQKRNRQTNERIE | |
| | EIIRTTGKENAKYLIEKIKLHDMQEGKCLYSLEAIPLEDLLNNPFNYEV | |
| | DHIIPRSVSFDNSFNNKVLVKQEENSKKGNRTPFQYLSSSDSKISYETF | |
| | KKHILNLAKGKGRISKTKKEYLLEERDINRFSVQKDFINRNLVDTRYAT | |
| | RGLMNLLRSYFRVNNLDVKVKSINGGFTSFLRRKWKFKKERNKGYKHHA | |
| | EDALIIANADFIFKEWKKLDKAKKVMENQMFEEKQAESMPEIETEQEYK | |
| | EIFITPHQIKHIKDFKDYKYSHRVDKKPNRELINDTLYSTRKDDKGNTL | |
| | IVNNLNGLYDKDNDKLKKLINKSPEKLLMYHHDPQTYQKLKLIMEQYGD | |
| | EKNPLYKYYEETGNYLTKYSKKDNGPVIKKIKYYGNKLNAHLDITDDYP | |
| | NSRNKVVKLSLKPYRFDVYLDNGVYKFVTVKNLDVIKKENYYEVNSKCY | |
| | EEAKKLKKISNQAEFIASFYNNDLIKINGELYRVIGVNNDLLNRIEVNM | |
| | IDITYREYLENMNDKRPPRIIKTIASKTQSIKKYSTDILGNLYEVKSKK | |
| | HPQIIKKGGSAGSGGSGGSGPKKKRKV | |
| Slu sRNA | mN*mN*mN*NNNNNNNNNNNNNNNNNNNGUUUUAGUACUCUGGAAACAG | 1269 |
| backbone | AAUCUACUGAAACAAGACAAUAUGUCGUGUUUAUCCCAUCAAUUUAUUG | |
| | GUGGmG*mA*mU* | |
| Slucas9 | MPKKKRKVGMNQKFILGLDIGITSVGYGLIDYETKNIIDAGVRLFPEAN | 1270 |
| Polypeptide | VENNEGRRSKRGSRRLKRRRIHRLERVKKLLEDYNLLDQSQIPQSTNPY | |
| | AIRVKGLSEALSKDELVIALLHIAKRRGIHKIDVIDSNDDVGNELSTKE | |
| | QLNKNSKLLKDKFVCQIQLERMNEGQVRGEKNRFKTADIIKEIIQLLNV | |
| | QKNFHQLDENFINKYIELVEMRREYFEGPGKGSPYGWEGDPKAWYETLM | |
| | GHCTYFPDELRSVKYAYSADLFNALNDLNNLVIQRDGLSKLEYHEKYHI | |
| | IENVFKQKKKPTLKQIANEINVNPEDIKGYRITKSGKPQFTEFKLYHDL | |
| | KSVLFDQSILENEDVLDQIAEILTIYQDKDSIKSKLTELDILLNEEDKE | |
| | NIAQLTGYTGTHRLSLKCIRLVLEEQWYSSRNQMEIFTHLNIKPKKINL | |
| | TAANKIPKAMIDEFILSPVVKRTFGQAINLINKIIEKYGVPEDIIIELA | |
| | RENNSKDKQKFINEMQKKNENTRKRINEIIGKYGNQNAKRLVEKIRLHD | |
| | EQEGKCLYSLESIPLEDLLNNPNHYEVDHIIPRSVSFDNSYHNKVLVKQ | |
| | SENSKKSNLTPYQYFNSGKSKLSYNQFKQHILNLSKSQDRISKKKKEYL | |
| | LEERDINKFEVQKEFINRNLVDTRYATRELTNYLKAYFSANNMNVKVKT | |
| | INGSFTDYLRKVWKFKKERNHGYKHHAEDALIIANADFLFKENKKLKAV | |
| | NSVLEKPEIETKQLDIQVDSEDNYSEMFIIPKQVQDIKDFRNFKYSHRV | |
| | DKKPNRQLINDTLYSTRKKDNSTYIVQTIKDIYAKDNTTLKKQFDKSPE | |
| | KFLMYQHDPRTFEKLEVIMKQYANEKNPLAKYHEETGEYLTKYSKKNNG | |
| | PIVKSLKYIGNKLGSHLDVTHQFKSSTKKLVKLSIKPYRFDVYLTDKGY | |
| | KFITISYLDVLKKDNYYYIPEQKYDKLKLGKAIDKNAKFIASFYKNDLI | |
| | KLDGEIYKIIGVNSDTRNMIELDLPDIRYKEYCELNNIKGEPRIKKTIG | |
| | KKVNSIEKLTTDVLGNVFTNTQYTKPQLLFKRGNGSGGSGGSGAKRPAA | |
| | TKKAGQAKKKKHHHHHH | |
| Sa sgRNA | mN*mN*mN*NNNNNNNNNNNNNNNNNNGUUUUAGUACUCUGGAAACAGA | 1271 |
| backbone | AUCUACUAAAACAAGGCAAAAUGCCGUGUUUAUCUCGUCAACUUGUUGG | |
| | CGAmG*mA*mU* | |
| SaCas9 | MHHHHHHHHGSGGSGGSGPKKKRKVGSGGSGGSGKRNYILGLDIGITSV | 1272 |
| polypeptide | GYGIIDYETRDVIDAGVRLFKEANVENNEGRRSKRGARRLKRRRRHRIQ | |
| | RVKKLLFDYNLLTDHSELSGINPYEARVKGLSQKLSEEEFSAALLHLAK | |
| | RRGVHNVNEVEEDTGNELSTKEQISRNSKALEEKYVAELQLERLKKDGE | |
| | VRGSINRFKTSDYVKEAKQLLKVQKAYHQLDQSFIDTYIDLLETRRTYY | |
| | EGPGEGSPFGWKDIKEWYEMLMGHCTYFPEELRSVKYAYNADLYNALND | |
| | LNNLVITRDENEKLEYYEKFQIIENVFKQKKKPTLKQIAKEILVNEEDI | |
| | KGYRVTSTGKPEFTNLKVYHDIKDITARKEIIENAELLDQIAKILTIYQ | |
| | SSEDIQEELTNLNSELTQEEIEQISNLKGYTGTHNLSLKAINLILDELW | |
| | HTNDNQIAIFNRLKLVPKKVDLSQQKEIPTTLVDDFILSPVVKRSFIQS | |
| | IKVINAIIKKYGLPNDIIIELAREKNSKDAQKMINEMQKRNRQTNERIE | |
| | EIIRTTGKENAKYLIEKIKLHDMQEGKCLYSLEAIPLEDLLNNPFNYEV | |
| | DHIIPRSVSFDNSFNNKVLVKQEENSKKGNRTPFQYLSSSDSKISYETF | |
| | KKHILNLAKGKGRISKTKKEYLLEERDINRFSVQKDFINRNLVDTRYAT | |
| | RGLMNLLRSYFRVNNLDVKVKSINGGFTSFLRRKWKFKKERNKGYKHHA | |
| | EDALIIANADFIFKEWKKLDKAKKVMENQMFEEKQAESMPEIETEQEYK | |
| | EIFITPHQIKHIKDFKDYKYSHRVDKKPNRELINDTLYSTRKDDKGNTL | |
| | IVNNLNGLYDKDNDKLKKLINKSPEKLLMYHHDPQTYQKLKLIMEQYGD | |
| | EKNPLYKYYEETGNYLTKYSKKDNGPVIKKIKYYGNKLNAHLDITDDYP | |
| | NSRNKVVKLSLKPYRFDVYLDNGVYKFVTVKNLDVIKKENYYEVNSKCY | |
| | EEAKKLKKISNQAEFIASFYNNDLIKINGELYRVIGVNNDLLNRIEVNM | |
| | IDITYREYLENMNDKRPPRIIKTIASKTQSIKKYSTDILGNLYEVKSKK | |
| | HPQIIKKGGSAGSGGSGGSGPKKKRKV | |
| Forward primer | TGATATCGGAGGCAGCATCC | 1273 |
| Reverse primer | CTTCAGGCCACTCTTGCTGA | 1274 |
| Probe | CTTCCCCTCCTCCTTCTGC | 1275 |
| Forward primer | CATAGACTGAGCCTGGGATTTG | 1276 |
| Reverse primer | CAAAGCATGGGAACAGCACC | 1277 |
| Probe | AGGATGTGACAACCCGTCTC | 1278 |
| Forward primer | CCCAGTGACTAGTGTTCAGC | 1279 |
| Reverse primer | CTTTCGCTCGACATCCACTG | 1280 |
| Probe | CTGGATCAGGAGCACAGTAGAC | 1281 |
| Target | N19-21-NGG | 1282 |
| sequence | | |
| Target | N19-22-NNGG | 1283 |
| sequence | | |
| Target | N19-22-NNGRRT | 1284 |
| sequence | | |
| SpCas9 sgRNA | GUUUUAGAGCUAGAAAUAGCAAGUUAAAAUAAGGCUAGUCCGUUAUCAA | |
| backbone | CUUGAAAAAGUGGCACCGAGUCGGUGCU | 1285 |
| SluCas9 sgRNA | GUUUUAGUACUCUGGAAACAGAAUCUACUGAAACAAGACAAUAUGUCGU | |
| backbone | GUUUAUCCCAUCAAUUUAUUGGUGGGAU | 1286 |
| SaCas9 sgRNA | GUUUUAGUACUCUGGAAACAGAAUCUACUAAAACAAGGCAAAAUGCCGU | |
| backbone | GUUUAUCUCGUCAACUUGUUGGCGAGAU | 1287 |
| SV40 NLS 1 | PKKKRKV | 1288 |
| SV40 NLS 2 | PKKKRRV | 1289 |
| nucleoplasmin | KRPAATKKAGQAKKKK | 1290 |
| NLS | | |
| Sp tcrRNA | GTTTCAGAGCTATGCTGGAAACAGCATAGCAAGTTGAAATAAGGCTAGTCCGTTATCAAC | 3754 |
| | TTGAAAAAGTGGCACCGAGTCGGTGCT | |
| Sp tcrRNA | GTTTAAGTACTCTGTGCTGGAAACAGCACAGAATCTACTTAAACAAGGCAAAATGCCGTG | 3755 |
| | TTTATCTCGTCAACTTGTTGGCGAGA | |
| SpCas9 DNA | ATGGGCCCCGCCGCCAAGAGAGTGAAGCTGGACggatccGACAAGAAGTACTCCATTGGG | 3756 |
| sequence | CTGGACATTGGCACTAACTCCGTGGGATGGGCCGTGATCACCGACGAGTACAAAGTGCCC | |
| (SpCAS9 v2) | AGCAAGAAGTTTAAAGTGCTGGGGAATACTGACCGGCACAGCATCAAGAAGAACCTTATA | |
| | GGCGCCCTCCTGTTTGATTCCGGAGAAACCGCTGAAGCCACCCGGCTCAAGAGAACCGCC | |
| | AGACGCCGCTACACCCGGAGGAAGAATCGCATCTGCTATCTGCAAGAGATCTTCTCCAAC | |
| | GAAATGGCCAAGGTGGACGACTCGTTCTTCCATCGGCTGGAGGAGTCCTTTCTGGTGGAA | |
| | GAAGATAAGAAGCATGAGAGACACCCCATCTTCGGCAACATCGTGGATGAAGTGGCCTAC | |
| | CACGAAAAGTACCCTACCATCTACCACCTTCGCAAGAAGCTCGTGGATAGCACTGATAAG | |
| | GCGGACCTCCGCCTGATCTACCTCGCGCTCGCCCATATGATCAAGTTCCGGGGACACTTC | |
| | CTGATCGAGGGGGACCTGAACCCTGACAACAGCGACGTGGATAAGCTGTTCATCCAACTG | |
| | GTGCAAACCTATAACCAGCTGTTCGAGGAGAACCCTATCAACGCCTCCGGAGTGGACGCC | |
| | AAGGCCATCCTGTCGGCTCGCCTGTCCAAGTCGAGAAGGCTGGAAAACCTGATTGCCCAG | |
| | CTCCCGGGAGAAAAGAAGAACGGCCTGTTCGGCAACCTGATCGCTCTCTCCCTGGGCCTG | |
| | ACCCCGAATTTCAAGAGCAACTTCGACCTCGCCGAAGATGCAAAGCTCCAGCTGTCAAAA | |
| | GACACCTACGACGATGACCTGGACAATCTGCTGGCACAGATCGGGGATCAGTACGCTGAC | |
| | CTGTTCCTGGCCGCCAAGAACCTGTCCGACGCGATCCTGCTCTCGGATATTCTGAGGGTC | |
| | AACACCGAGATTACCAAGGCCCCTCTGTCCGCGAGCATGATCAAGCGGTACGATGAACAT | |
| | CACCAGGATCTGACACTCTTGAAGGCCCTTGTCCGCCAACAACTGCCGGAGAAGTACAAG | |
| | GAGATTTTCTTTGATCAGTCCAAGAACGGCTACGCTGGCTACATTGACGGGGGTGCCAGC | |
| | CAGGAAGAATTTTACAAGTTCATTAAGCCTATTCTCGAAAAGATGGACGGAACTGAGGAG | |
| | TTGCTCGTGAAGCTGAACCGGGAGGACCTGTTGAGAAAGCAACGCACCTTCGACAACGGT | |
| | TCGATTCCTCATCAAATTCATCTGGGTGAACTGCACGCCATCCTCCGGCGGCAGGAGGAT | |
| | TTCTATCCATTCCTGAAAGACAACCGAGAGAAGATTGAGAAAATCCTGACCTTCCGGATA | |
| | CCCTACTACGTGGGACCATTGGCTCGGGGGAACAGCAGATTCGCGTGGATGACTAGAAAG | |
| | TCCGAGGAGACTATTACCCCGTGGAACTTCGAGGAGGTGGTCGATAAGGGCGCATCGGCA | |
| | CAGTCCTTCATCGAGCGGATGACCAACTTCGACAAGAACCTTCCCAACGAAAAGGTGCTG | |
| | CCCAAGCACTCGCTGTTGTACGAGTACTTTACCGTGTACAACGAGCTCACTAAAGTGAAA | |
| | TACGTGACCGAGGGAATGAGAAAGCCGGCCTTTCTGTCCGGGGAACAGAAGAAGGCCATC | |
| | GTGGACCTCCTCTTCAAAACCAACAGAAAAGTCACCGTGAAGCAGCTGAAGGAGGACTAC | |
| | TTCAAGAAAATCGAGTGCTTCGACTCGGTCGAGATTTCGGGGGTCGAGGATAGGTTTAAT | |
| | GCCAGCCTGGGTACTTACCACGATCTGCTGAAGATCATTAAGGACAAGGACTTCCTTGAC | |
| | AACGAAGAAAACGAGGACATCCTTGAGGACATTGTCCTGACCCTGACCCTGTTTGAGGAT | |
| | CGGGAGATGATTGAGGAAAGACTTAAGACCTACGCTCATTTGTTCGACGACAAGGTCATG | |
| | AAACAGCTGAAGCGGAGGCGGTACACTGGATGGGGTCGGCTGTCCAGGAAGCTGATCAAC | |
| | GGAATCCGGGACAAGCAATCCGGAAAGACCATCCTGGACTTCCTGAAGTCAGACGGGTTC | |
| | GCCAACCGGAACTTCATGCAGCTCATTCACGACGACAGCCTGACGTTCAAGGAGGACATC | |
| | CAGAAGGCACAAGTGTCGGGACAGGGAGACAGCCTCCACGAACACATTGCGAACCTCGCG | |
| | GGTTCACCGGCTATCAAGAAGGGAATCCTGCAGACTGTGAAGGTGGTGGACGAGTTGGTC | |
| | AAGGTCATGGGCAGGCATAAGCCTGAAAACATCGTGATCGAGATGGCCCGGGAGAACCAG | |
| | ACCACCCAGAAGGGGCAGAAGAACAGCAGAGAGCGCATGAAGCGCATTGAGGAGGGCATC | |
| | AAGGAACTGGGATCACAGATCCTGAAGGAACATCCCGTGGAAAACACGCAGCTGCAGAAC | |
| | GAGAAACTCTACCTGTACTATTTGCAAAACGGCCGCGATATGTACGTGGACCAAGAACTC | |
| | GATATCAACCGCCTGTCCGACTACGACGTGGACCACATCGTGCCGCAGAGCTTCCTGAAG | |
| | GATGATTCTATCGATAACAAGGTCCTCACCCGGTCGGACAAGAATCGGGGGAAGTCAGAT | |
| | AACGTGCCGTCTGAGGAAGTGGTGAAGAAGATGAAGAATTACTGGCGGCAGCTTCTGAAC | |
| | GCGAAACTTATTACCCAGCGGAAATTCGACAACCTGACTAAGGCCGAGCGGGGAGGACTG | |
| | TCAGAACTGGACAAAGCCGGCTTCATTAAGAGACAGCTGGTCGAAACTCGCCAGATCACC | |
| | AAACATGTGGCCCAGATCCTGGACTCCAGGATGAACACCAAGTACGACGAAAACGATAAG | |
| | CTCATTCGGGAAGTGAAAGTGATCACACTGAAGTCCAAGCTGGTGTCCGACTTCCGCAAG | |
| | GACTTCCAGTTCTACAAGGTCCGCGAGATTAACAACTACCACCACGCACACGACGCTTAC | |
| | TTGAACGCCGTCGTGGGCACTGCCTTGATTAAGAAATACCCGAAGCTGGAATCCGAGTTC | |
| | GTGTACGGAGACTACAAGGTGTACGATGTGCGCAAGATGATCGCCAAGTCGGAGCAAGAA | |
| | ATCGGAAAGGCCACCGCTAAGTATTTCTTTTACTCCAACATTATGAACTTCTTCAAGACT | |
| | GAGATCACCCTGGCCAATGGAGAAATCCGCAAGAGGCCGCTGATCGAAACCAATGGAGAG | |
| | ACTGGAGAGATTGTGTGGGATAAGGGACGCGACTTCGCCACCGTGCGCAAGGTGCTGAGC | |
| | ATGCCCCAAGTCAACATTGTGAAAAAGACCGAAGTGCAGACGGGCGGTTTCTCAAAGGAA | |
| | AGCATCCTGCCTAAGCGGAACTCCGATAAGCTGATCGCGCGCAAGAAGGACTGGGACCCG | |
| | AAGAAATATGGCGGCTTCGACTCCCCCACCGTCGCCTACTCGGTGCTCGTCGTGGCTAAA | |
| | GTGGAGAAGGGAAAGTCGAAGAAGCTCAAGTCCGTGAAGGAATTGCTGGGTATTACTATT | |
| | ATGGAACGGTCCAGCTTCGAGAAGAATCCGATCGACTTCCTGGAGGCCAAGGGATACAAG | |
| | GAAGTGAAGAAGGACCTGATCATTAAGCTGCCGAAGTACAGCCTTTTTGAGCTGGAAAAC | |
| | GGACGCAAGCGGATGCTGGCCTCCGCCGGAGAGCTGCAGAAGGGCAACGAACTGGCCCTC | |
| | CCGTCCAAATACGTGAACTTTCTGTACCTGGCCAGCCACTACGAGAAGCTGAAGGGATCA | |
| | CCTGAAGATAACGAGCAGAAGCAGCTGTTCGTGGAACAACATAAGCATTATCTTGACGAG | |
| | ATCATTGAACAGATCTCTGAGTTCTCCAAGAGAGTGATTCTGGCTGACGCTAACCTTGAC | |
| | AAAGTGCTGAGCGCTTACAACAAGCACAGGGACAAGCCCATCCGGGAGCAGGCAGAGAAC | |
| | ATCATTCACCTGTTCACTCTCACCAACTTGGGTGCCCCGGCAGCCTTCAAGTACTTCGAT | |
| | ACCACAATCGACCGCAAGAGGTACACCTCAACCAAGGAGGTCCTTGACGCTACCCTGATC | |
| | CATCAATCCATTACCGGCCTGTACGAAACTAGGATCGACCTGTCGCAGCTGGGTGGCGAC | |
| | AAGCTTCCTGCCGCCAAGAGAGTGAAGCTGGACtaa | |
| SaCas9 DNA | atgCCTGCCGCCAAGAGAGTGAAGCTGGACggatccggaaagcggaactata | 3757 |
| sequence | tcctgggactggacatcggaattacctccgtgggatacggcatcatcgattacgagactagggacgtgat | |
| | tgacgccggcgtgagactctttaaggaggccaacgtggaaaacaacgaaggtcgcagatccaagcgg | |
| | ggtgcaagacgcctgaagcgccggaggagacatcggatacagcgcgtgaagaagctccttttcgacta | |
| | caacctcctcactgaccactcggaattgtccggtatcaacccctacgaagcccgcgtgaaaggcctgag | |
| | ccagaagctgtccgaagaggagtttagcgcagccctgctgcacctggctaagcgaaggggggtgcac | |
| | aacgtgaacgaggtggaggaggacactggcaacgaactgtccaccaaggagcagatttcacggaact | |
| | cgaaggcgctggaagagaaatatgtggccgagctgcagctggagaggctcaagaaggatggcgaag | |
| | tccgggggagcatcaatcgcttcaagacctcggactacgtgaaggaagccaaacagctgttgaaggtg | |
| | cagaaggcctaccaccaactggaccaatcattcattgacacttacatcgatctgcttgaaaccaggcgca | |
| | cctactacgagggtcctggagaaggcagccctttcggatggaaggacatcaaggagtggtatgagatg | |
| | ctgatgggtcattgcacctactttccggaagaactgcgctcagtgaagtacgcgtacaacgctgacctcta | |
| | caacgctctcaacgatctgaacaacctcgtgatcacccgggacgagaacgaaaagctggagtactacg | |
| | aaaagttccagattatcgaaaacgtgttcaagcagaagaagaagcccaccctgaagcagattgcaaag | |
| | gagatccttgtgaacgaggaggatattaagggctaccgggtcacctccaccgggaaaccagagttcact | |
| | aatctcaaggtgtaccatgacattaaggacattactgcccgcaaggagatcattgaaaacgcggaactgc | |
| | tggaccaaatcgcgaagatcctgaccatctatcagagctccgaggatatccaggaggaacttactaacct | |
| | caattccgagctgacgcaggaagaaatcgagcaaattagcaacctgaagggttacactggaacccaca | |
| | acctcagcttgaaagcgattaaccttattttggatgaactttggcacactaatgacaatcagatcgccatttt | |
| | caaccggctgaaactggtgccgaagaaggtggacctgagccaacagaaggaaatcccgaccaccctt | |
| | gtggacgatttcatcctgtcacctgtggtgaagaggagcttcatccagtcgatcaaggtcatcaacgccat | |
| | cataaagaagtacggccttcccaacgacatcatcatcgaactggcccgcgagaagaactccaaagatg | |
| | cccagaagatgatcaacgagatgcagaagcgaaaccggcagacgaacgaacggatcgaggagatca | |
| | tccggaccaccgggaaggaaaacgcgaagtacctgatcgagaaaatcaagctgcatgatatgcagga | |
| | agggaagtgtctctactccctggaggccattccgctggaggatttgctgaacaaccctttcaactacgaa | |
| | gtcgatcatatcattcctcgctccgtgtccttcgataactccttcaacaataaggtcctcgtgaagcaggag | |
| | gagaactcgaagaagggcaacagaaccccgttccagtacctctcgtcgtccgactccaagatcagctac | |
| | gaaactttcaagaagcacattctgaacctggccaagggcaaagggagaattagcaagaccaagaagg | |
| | aatacctcctggaagagagagacatcaaccgcttctcggtgcaaaaggatttcatcaaccgcaacctggt | |
| | cgataccagatacgccaccaggggactgatgaacctcctgcggtcctacttccgggtcaacaatctgga | |
| | cgtgaaggtcaaatccatcaacgggggctttacttctttcctgcgccggaagtggaagttcaagaaggaa | |
| | cggaacaagggatacaagcaccacgctgaagatgccctgattattgccaacgccgacttcatctttaagg | |
| | aatggaaaaagctggacaaggctaagaaggtcatggagaaccagatgttcgaagaaaagcaggccga | |
| | gtccatgcccgaaatcgaaaccgagcaggaatacaaggagatcttcatcacaccgcaccaaatcaagc | |
| | acatcaaggacttcaaggattacaagtacagccaccgggtggacaagaagcctaacagagagcttatc | |
| | aacgacaccctgtactccacgcgcaaggacgacaagggaaacacattgatcgtgaacaacctgaacg | |
| | gactgtatgacaaggacaatgacaaactgaagaagctgatcaacaaatcgccggaaaagctcctgatgt | |
| | accatcacgaccctcaaacctaccagaaactgaagctcatcatggagcagtacggcgacgaaaagaat | |
| | cccctgtacaaatactacgaggagactggaaattacctgactaagtactccaagaaggataacggcccc | |
| | gtgatcaagaagattaagtactacggaaacaaactgaacgcacatctcgacatcaccgatgattatccaa | |
| | actcccgcaacaaagtcgtgaagctctccctcaaaccgtaccgcttcgacgtgtacctggataatggggt | |
| | gtacaagttcgtgaccgtgaagaacctggacgtcattaagaaggaaaactactacgaagtgaactcaaa | |
| | gtgctacgaggaagccaagaagctcaagaagatcagcaaccaggccgagttcatcgcatcgttttacaa | |
| | caatgacctcattaagattaatggagaactgtacagagtgatcggcgtgaacaacgacctcctgaaccg | |
| | gattgaagtgaacatgatcgatattacctaccgggagtatctggagaacatgaacgacaagcgcccacc | |
| | gagaatcatcaaaactattgcctccaagacccaatccattaagaaatactccaccgacatcctgggcaac | |
| | ctgtacgaggtcaagtcgaagaagcacccccagattatcaagaagggaaagcttCCTGCCGCC | |
| | AAGAGAGTGAAGCTGGACtaa | |
| Truncated CMV | GAATTCGTGGTGAGCGTCTGGGCATGTCTGGGCATGTCTGGGC | 3758 |
| promoter | ATGTCTGGGCATGTCGGGCATTCTGGGCGTCTGGGCATGTCTG | |
| | GGCATGTCTGGGCATCTCGAGACTCACGGGGATTTCCAAGTCT | |
| | CCACCCCATTGACGTCAATGGGAGTTTGTTTTGGCACCAAAAT | |
| | CAACGGGACTTTCCAAAATGTCGTAATAACCCCGCCCCGTTGA | |
| | CGCAAATGGGCGGTAGGCGTGTACGGTGGGAGGTCTATATAA | |
| | GCAGAGCTCGTTTAGTGAACCGT | |
| Regular CMV | GGTGTGGAAAGTCCCCAGGCTCCCCAGCAGGCAGAAGTATGC | 3759 |
| promoter | AAAGCATGCATCTCAATTAGTCAGCAACCACGTTACATAACTT | |
| | ACGGTAAATGGCCCGCCTGGCTGACCGCCCAACGACCCCCGCC | |
| | CATTGACGTCAATAATGACGTATGTTCCCATAGTAACGCCAAT | |
| | AGGGACTTTCCATTGACGTCAATGGGTGGAGTATTTACGGTAA | |
| | ACTGCCCACTTGGCAGTACATCAAGTGTATCATATGCCAAGTA | |
| | CGCCCCCTATTGACGTCAATGACGGTAAATGGCCCGCCTGGCA | |
| | TTATGCCCAGTACATGACCTTATGGGACTTTCCTACTTGGCAGT | |
| | ACATCTACGTATTAGTCATCGCTATTACCATGGTGATGCGGTTT | |
| | TGGCAGTACATCAATGGGCGTGGATAGCGGTTTGACTCACGGG | |
| | GATTTCCAAGTCTCCACCCCATTGACGTCAATGGGAGTTTGTTT | |
| | TGGCACCAAAATCAACGGGACTTTCCAAAATGTCGTAACAACT | |
| | CCGCCCCATTGACGCAAATGGGCGGTAGGCGTGTACGGTGGGA | |
| | GGTCTATATAAGCAGAGCTCGTTTAGTGAACCGT | |
| U6 promoter | GAGGGCCTATTTCCCATGATTCCTTCATATTTGCATATACGATA | 3760 |
| | CAAGGCTGTTAGAGAGATAATTGGAATTAATTTGACTGTAAAC | |
| | ACAAAGATATTAGTACAAAATACGTGACGTAGAAAGTAATAA | |
| | TTTCTTGGGTAGTTTGCAGTTTTAAAATTATGTTTTAAAATGGA | |
| | CTATCATATGCTTACCGTAACTTGAAAGTATTTCGATTTCTTGG | |
| | CTTTATATATCTTGTGGAAAGGACGAAACACCG+1 | |

1. A system for introducing a deletion in a genomic DNA molecule comprising a fatty-acid amide hydrolase gene (FAAH) upstream a FAAH pseudogene (FAAH-OUT) in a cell, the system comprising:
(i) a site-directed endonuclease in the form of protein, an mRNA encoding the site-directed endonuclease, or a recombinant expression vector comprising a nucleotide sequence encoding the site-directed endonuclease;
(ii) a first gRNA molecule comprising a spacer sequence corresponding to a first target sequence adjacent a first PAM which is downstream of a 3′ terminus of FAAH and upstream a transcriptional start site of FAAH-OUT in the genomic DNA molecule, wherein when the first gRNA is introduced into a cell with a site-directed endonuclease that recognizes the PAM, the first gRNA combines with the site-directed endonuclease to induce cleavage proximal the first target sequence with a cleavage efficiency of at least 15%, 20%, 25%, or 30%; and
(iii) a second gRNA molecule comprising a spacer sequence corresponding to a second target sequence adjacent a second PAM which is downstream of the FAAH-OUT transcriptional start site and upstream an exon 3 of FAAH-OUT in the genomic DNA molecule, wherein when the second gRNA is introduced into a cell with the site-directed endonuclease, the second gRNA combines with the site-directed endonuclease to induce cleavage proximal the second target sequence with a cleavage efficiency of at least 15%, 20%, 25%, or 30%,
wherein when the system is introduced to the cell with the site-directed endonuclease, the first gRNA and second gRNA combine with the site-directed endonuclease to induce cleavage proximal the first and second target sequences, to introduce an approximately 2-10 kb deletion in the genomic DNA molecule resulting in a full or a partial removal of a FAAH-OUT promoter (FOP) and a FAAH-OUT conserved (FOC) element, thereby resulting in elimination of FAAH mRNA expression in the cell.

2-100. (canceled)

101. A nucleic acid molecule comprising:
(i) a nucleotide sequence encoding a first gRNA comprising a spacer sequence corresponding to a first target sequence adjacent a first PAM which is downstream of a 3′ terminus of FAAH and upstream a transcriptional start site of FAAH-OUT in the genomic DNA molecule, wherein when the first gRNA is introduced into a cell with the site-directed endonuclease, the first gRNA combines with the site-directed endonuclease to induce cleavage proximal the first target sequence with a cleavage efficiency of at least 30%; and
(ii) a and a nucleotide sequence encoding a second gRNA comprising a spacer sequence corresponding to a second target sequence adjacent a second PAM which is downstream of the FAAH-OUT transcriptional start site and upstream an exon 3 of FAAH-OUT in the genomic DNA molecule, wherein when the second gRNA is introduced into a cell with the site-directed endonuclease, the second gRNA combines with the site-directed endonuclease to induce cleavage proximal the second target sequence with a cleavage efficiency of at least 30%,
wherein when the first and second gRNAs are introduced into a cell with (i) a SluCas9 endonuclease or functional variant thereof or (ii) a SpCas9 endonuclease or functional variant thereof, result in an approximate 2-8 kb deletion in a in a genomic DNA molecule comprising FAAH upstream FAAH-OUT, wherein the deletion results in full removal of a FAAH-OUT promoter (FOP) and a FAAH-OUT conserved (FOC) element in the genomic DNA molecule.

102-119. (canceled)

120. A system for introducing a mutation in a genomic DNA molecule comprising FAAH in a cell, the system comprising:
(i) a site-directed endonuclease in the form of protein, an mRNA encoding the site-directed endonuclease, or a recombinant expression vector comprising a nucleotide sequence encoding the site-directed endonuclease; and
(ii) a gRNA molecule comprising a spacer sequence corresponding to a target sequence within or proximal exon 1, exon 2, exon 3, or exon 4 of the FAAH coding sequence,
wherein when the gRNA is introduced into a cell with the site-directed endonuclease, the gRNA combines with the endonuclease to induce a cleavage proximal the target sequence in the genomic DNA with a cleavage efficiency of at least 15%, 20%, 25%, 30%, 35%, 40%, 45%, or 50%, wherein the cleavage is a double-stranded DNA break (DSB), whereby repair of the DSB results in a mutation, and wherein the mutation provides reduced cellular expression of FAAH mRNA by at least 15%, 20%, 25%, 30%, 35%, 40%, 45%, 50%, 55%, 60%, 65%, 70%, 75%, 80%, 85%, or 90% in the cell.

121. The system of claim 120, wherein the PAM is NNGG, NGG, or NNGRRT.

122. The system of claim 121, wherein the site-directed endonuclease is a SluCas9 endonuclease or a functional derivative thereof, an mRNA encoding the SluCas9 endonuclease or functional derivative thereof, or a recombinant expression vector comprising a nucleotide sequence encoding the SluCas9 endonuclease or functional derivative thereof.

123. The system of claim 121, wherein the site-directed endonuclease is a SpCas9 polypeptide or functional derivative thereof, an mRNA encoding the SpCas9 endonuclease or functional derivative thereof, or a recombinant expression vector comprising a nucleotide sequence encoding the SpCas9 endonuclease or functional derivative thereof.

124. The system of claim 121, wherein the site-directed endonuclease is a SaCas9 polypeptide or functional derivative thereof, an mRNA encoding the SaCas9 endonuclease or functional derivative thereof, or a recombinant expression vector comprising a nucleotide sequence encoding the SaCas9 endonuclease or functional derivative thereof.

125-130. (canceled)

131. The system of claim 123, wherein the target sequence is within exon 1 or exon 2 of FAAH.

132. The system of claim 131, wherein the mutation is an insertion or deletion (INDEL), optionally wherein the mutation is a frameshift mutation, introduction of a stop codon, or a point mutation.

133. The system of claim 131, wherein the spacer sequence comprises:
(a) a nucleotide sequence having up to 1, 2, or 3 nucleotide deletions or substitutions relative to any one of SEQ ID NOs: 42, 43, 60, 63, 64, 65, 66, and 68; or
(b) a nucleotide sequence set forth in SEQ ID NOs: 42, 43, 60, 63, 64, 65, 66, or 68.

134. The system of claim 131, wherein the spacer sequence comprises:
(i) a nucleotide sequence having up to 1 or 2 nucleotide deletions relative to any one of SEQ ID NOs: 63, 64, 65, 66 or 68; or
(ii) a nucleotide sequence set forth in SEQ ID NOs: 63, 64, 65, 66 or 68.

135-168. (canceled)

169. A nucleic acid molecule comprising a nucleotide sequence encoding one or more gRNA molecules targeting a target site in a genomic DNA molecule comprising a fatty-acid amide hydrolase gene (FAAH) in a cell, the gRNA(s) selected from:
(i) a gRNA comprising a spacer sequence corresponding to a target sequence consisting of a nucleotide sequence selected from any one of SEQ ID NOs: 4, 5, 7, 14, and 20;
(ii) a gRNA comprising a spacer sequence corresponding to a target sequence consisting of a nucleotide sequence selected from any one of SEQ ID NOs: 3, 6, 8-13, 16-19, 21-34;
(iii) a gRNA molecule comprising a spacer sequence comprising a nucleotide sequence selected from any one of SEQ ID NOs: 38, 39, 41, 48, and 54; and
(iv) a gRNA molecule comprising a spacer sequence comprising a nucleotide sequence selected from any one of SEQ ID NOs: 37, 40, 42-47, 50-53, 55-68.

170. The nucleic acid molecule of claim 169, wherein the nucleotide sequence encodes one or more gRNA molecule selected from:
(i) a gRNA comprising a spacer sequence corresponding to a target sequence consisting of a nucleotide sequence set forth in SEQ ID NO: 29, 30, 31, 32 or 34; or
(ii) a gRNA molecule comprising a spacer sequence comprising a nucleotide sequence set forth in SEQ ID NO: 63, 64, 65, 66 or 68.

171. (canceled)

172. A nucleic acid molecule comprising a nucleotide sequence encoding one or more gRNA molecules targeting a target site in a genomic DNA molecule comprising a fatty-acid amide hydrolase gene (FAAH) in a cell, the gRNA(s) selected from:
(i) a gRNA comprising a spacer sequence corresponding to a target sequence consisting of a nucleotide sequence selected from any one of SEQ ID NOs: 149, 150, 151, 152, 153, 155, 156, 158, 159, 160, 161, 162, 163 and 164; or
(ii) a gRNA molecule comprising a spacer sequence comprising a nucleotide sequence selected from any one of SEQ ID NOs: 165, 166, 167, 168, 169, 171, 172, 174, 175, 176, 177, 178, 179, and 180.

173. The nucleic acid molecule of claim 172, wherein the nucleotide sequence encodes one or more gRNA molecule selected from:
(i) a gRNA comprising a spacer sequence corresponding to a target sequence consisting of a nucleotide sequence set forth in SEQ ID NO: 149, 155, 159, 160 or 161; or
(ii) a gRNA molecule comprising a spacer sequence comprising a nucleotide sequence set forth in SEQ ID NO: 165, 171, 175, 176 or 177.

174-175. (canceled)

177. A recombinant expression vector comprising the nucleic acid molecule of claim 169.

178. The recombinant expression vector of claim 177 comprising a nucleotide sequence encoding a SpCas9 endonuclease or a functional variant thereof.

179. A recombinant expression vector comprising the nucleic acid molecule of claim 172.

180. The recombinant expression vector of claim 179 comprising a nucleotide sequence encoding a SaCas9 endonuclease or a functional variant thereof.

181. The recombinant expression vector of claim 177, wherein the vector is a viral vector.

182. The recombinant expression vector of claim 181, wherein the vector is an AAV vector.

183. The recombinant expression vector of claim 177, formulated in a lipid nanoparticle.

184. A pharmaceutical composition comprising recombinant expression vector of claim 177, and a pharmaceutically acceptable carrier.

185-191. (canceled)

192. A method for eliminating FAAH expression in a cell, the method comprising: contacting the cell with
the system according to claim 1
wherein when the system contacts the cell, the first gRNA and second gRNA combine with the site-directed endonuclease to induce a deletion in the genomic DNA molecule comprising FAAH upstream FAAH-OUT in the cell, thereby eliminating FAAH expression in the cell.

193-194. (canceled)

195. A method of treating a patient with chronic pain by eliminating FAAH expression in a target cell, the method comprising: administering to the patient an effective amount of
the system according to claim 1
wherein when the system is administered, the first gRNA and second gRNA combine with the site-directed endonuclease to induce a deletion in the genomic DNA molecule comprising FAAH upstream FAAH-OUT in the cell, thereby eliminating FAAH expression in the target cell.

196. (canceled)

197. The method of claim 195, wherein the target cell resides in the brain.

198. The method of claim 195, wherein the target cell resides in the dorsal root ganglion (DRG).

199. The method of claim 198, wherein the target cell is a sensory neuron.

200. The method of claim 195, wherein the route of administration is intra-DRG, intraneural, intrathecal, intra-cisternamagna, and intravenous.

201. The method of claim 195, wherein reduced FAAH expression results in increased levels of one or more N-acyl ethanolamines and/or one or more N-acyl taurines.

202. The method of claim 201, wherein the one or more N-acyl ethanolamine are selected from: N-arachidonoyl ethanolamine (AEA), palmitoylethanolamide (PEA), oleoylethanolamine (OEA), or combination thereof.

203. A system for use with a site-directed endonuclease to introduce a mutation in a genomic DNA molecule comprising FAAH in a cell, the system comprising a recombinant expression vector comprising (i) a nucleotide sequence encoding the site directed endonuclease, and (ii) a nucleotide sequence encoding the gRNA, wherein the gRNA comprises:
(i) a gRNA molecule comprising a spacer sequence comprising a nucleotide sequence set forth in SEQ ID NO: 165, 171, 175, 176 or 177; or; or
(ii) a gRNA comprising a spacer sequence corresponding to a target sequence consisting of a nucleotide sequence set forth in SEQ ID NO: 149, 155, 159, 160 or 161.

204. A system for use with a site-directed endonuclease to introduce a mutation in a genomic DNA molecule comprising FAAH in a cell, the system comprising a recombinant expression vector comprising (i) a nucleotide sequence encoding the site directed endonuclease, and (ii) a nucleotide sequence encoding the gRNA, wherein the gRNA comprises:
(i) a gRNA comprising a spacer sequence corresponding to a target sequence consisting of a nucleotide sequence set forth in SEQ ID NO: 29, 30, 31, 32 or 34; or
(ii) a gRNA molecule comprising a spacer sequence comprising a nucleotide sequence set forth in SEQ ID NO: 63, 64, 65, 66 or 68.

205. The system of claim 204, wherein the system comprises a first recombinant expression vector comprising a nucleotide sequence encoding the site-directed endonuclease, and a second recombinant expression vector comprising a nucleotide sequence encoding the gRNA.

206. The system of claim 204 wherein the vector is a viral vector.

207. The system of claim 206, wherein the vector is an AAV vector.

The application's sequence listing, which the Patent Office published only in electronic form, follows.

SEQUENCE LISTING (3760 sequences)

SEQ ID NO: 1 - DNA, 23 bp, Artificial Sequence
  Synthetic
aaacccggactggatcagccggg

SEQ ID NO: 2 - DNA, 23 bp, Artificial Sequence
  Synthetic
aaaacccggactggatcagccgg

SEQ ID NO: 3 - DNA, 23 bp, Artificial Sequence
  Synthetic
ctgatccagtccgggttttgcgg

SEQ ID NO: 4 - DNA, 23 bp, Artificial Sequence
  Synthetic
atccagtccgggttttgcggcgg

SEQ ID NO: 5 - DNA, 23 bp, Artificial Sequence
  Synthetic
ctccgccgcaaaacccggactgg

SEQ ID NO: 6 - DNA, 23 bp, Artificial Sequence
  Synthetic
tccgggttttgcggcggagcggg

SEQ ID NO: 7 - DNA, 23 bp, Artificial Sequence
  Synthetic
tggcgcctccggggtcgccctgg

SEQ ID NO: 8 - DNA, 23 bp, Artificial Sequence
  Synthetic
gcaggccagggcgaccccggagg

SEQ ID NO: 9 - DNA, 23 bp, Artificial Sequence
  Synthetic
cgccctggcctgctgcttcgtgg

SEQ ID NO: 10 - DNA, 23 bp, Artificial Sequence
  Synthetic
cgccacgaagcagcaggccaggg

SEQ ID NO: 11 - DNA, 23 bp, Artificial Sequence
  Synthetic
ccgccacgaagcagcaggccagg

SEQ ID NO: 12 - DNA, 23 bp, Artificial Sequence
  Synthetic
cctggcctgctgcttcgtggcgg

SEQ ID NO: 13 - DNA, 23 bp, Artificial Sequence
  Synthetic
ggcctgctgcttcgtggcggcgg

SEQ ID NO: 14 - DNA, 23 bp, Artificial Sequence
  Synthetic
ggccgccgccacgaagcagcagg

SEQ ID NO: 15 - DNA, 23 bp, Artificial Sequence
  Synthetic
ctgcttcgtggcggcggccgtgg

SEQ ID NO: 16 - DNA, 23 bp, Artificial Sequence
  Synthetic
gccgtggccctgcgctggtccgg

SEQ ID NO: 17 - DNA, 23 bp, Artificial Sequence
  Synthetic
ccgtggccctgcgctggtccggg

SEQ ID NO: 18 - DNA, 23 bp, Artificial Sequence
  Synthetic
cccggaccagcgcagggccacgg

SEQ ID NO: 19 - DNA, 23 bp, Artificial Sequence
  Synthetic
ccggcgcccggaccagcgcaggg

SEQ ID NO: 20 - DNA, 23 bp, Artificial Sequence
  Synthetic
ccctgcgctggtccgggcgccgg

SEQ ID NO: 21 - DNA, 23 bp, Artificial Sequence
  Synthetic
ggcgcagcgcttccggctccagg

SEQ ID NO: 22 - DNA, 23 bp, Artificial Sequence
  Synthetic
gtccaggtctgggttctgtgggg

SEQ ID NO: 23 - DNA, 23 bp, Artificial Sequence
  Synthetic
agtccaggtctgggttctgtggg

SEQ ID NO: 24 - DNA, 23 bp, Artificial Sequence
  Synthetic
gcgcctctgagtccaggtctggg

SEQ ID NO: 25 - DNA, 23 bp, Artificial Sequence
  Synthetic
agcgcctctgagtccaggtctgg

SEQ ID NO: 26 - DNA, 23 bp, Artificial Sequence
  Synthetic
ctagcagcgcctctgagtccagg

SEQ ID NO: 27 - DNA, 23 bp, Artificial Sequence
  Synthetic
cttctgcaccagctgaggcaggg

SEQ ID NO: 28 - DNA, 23 bp, Artificial Sequence
  Synthetic
tgtaacttctgcaccagctgagg

SEQ ID NO: 29 - DNA, 23 bp, Artificial Sequence
  Synthetic
ggtgaagagcacggcctcagggg

SEQ ID NO: 30 - DNA, 23 bp, Artificial Sequence
  Synthetic
ggccgtgctcttcacctatgtgg

SEQ ID NO: 31 - DNA, 23 bp, Artificial Sequence
  Synthetic
gccgtgctcttcacctatgtggg

SEQ ID NO: 32 - DNA, 23 bp, Artificial Sequence
  Synthetic
tcccacataggtgaagagcacgg

SEQ ID NO: 33 - DNA, 23 bp, Artificial Sequence
  Synthetic
gctcttcacctatgtgggaaagg

SEQ ID NO: 34 - DNA, 23 bp, Artificial Sequence
  Synthetic
tggccttacctttcccacatagg

SEQ ID NO: 35 - DNA, 20 bp, Artificial Sequence
  Synthetic
aaacccggacuggaucagcc

SEQ ID NO: 36 - DNA, 20 bp, Artificial Sequence
  Synthetic
aaaacccggacuggaucagc

SEQ ID NO: 37 - DNA, 20 bp, Artificial Sequence
  Synthetic
cugauccaguccggguuuug

SEQ ID NO: 38 - DNA, 20 bp, Artificial Sequence
  Synthetic
auccaguccggguuuugcgg

SEQ ID NO: 39 - DNA, 20 bp, Artificial Sequence
  Synthetic
cuccgccgcaaaacccggac

SEQ ID NO: 40 - DNA, 20 bp, Artificial Sequence
  Synthetic
uccggguuuugcggcggagc

SEQ ID NO: 41 - DNA, 20 bp, Artificial Sequence
  Synthetic
uggcgccuccggggucgccc

SEQ ID NO: 42 - DNA, 20 bp, Artificial Sequence
  Synthetic
gcaggccagggcgaccccgg

SEQ ID NO: 43 - DNA, 20 bp, Artificial Sequence
  Synthetic
cgcccuggccugcugcuucg

SEQ ID NO: 44 - DNA, 20 bp, Artificial Sequence
  Synthetic
cgccacgaagcagcaggcca

SEQ ID NO: 45 - DNA, 20 bp, Artificial Sequence
  Synthetic
ccgccacgaagcagcaggcc

SEQ ID NO: 46 - DNA, 20 bp, Artificial Sequence
  Synthetic
ccuggccugcugcuucgugg

SEQ ID NO: 47 - DNA, 20 bp, Artificial Sequence
  Synthetic
ggccugcugcuucguggcgg

SEQ ID NO: 48 - DNA, 20 bp, Artificial Sequence
  Synthetic
ggccgccgccacgaagcagc

SEQ ID NO: 49 - DNA, 20 bp, Artificial Sequence
  Synthetic
cugcuucguggcggcggccg

SEQ ID NO: 50 - DNA, 20 bp, Artificial Sequence
  Synthetic
gccguggcccugcgcugguc

SEQ ID NO: 51 - DNA, 20 bp, Artificial Sequence
  Synthetic
ccguggcccugcgcuggucc

SEQ ID NO: 52 - DNA, 20 bp, Artificial Sequence
  Synthetic
cccggaccagcgcagggcca

SEQ ID NO: 53 - DNA, 20 bp, Artificial Sequence
  Synthetic
ccggcgcccggaccagcgca

SEQ ID NO: 54 - DNA, 20 bp, Artificial Sequence
  Synthetic
cccugcgcugguccgggcgc

SEQ ID NO: 55 - DNA, 20 bp, Artificial Sequence
  Synthetic
ggcgcagcgcuuccggcucc

SEQ ID NO: 56 - DNA, 20 bp, Artificial Sequence
  Synthetic
guccaggucuggguucugug

SEQ ID NO: 57 - DNA, 20 bp, Artificial Sequence
  Synthetic
aguccaggucuggguucugu

SEQ ID NO: 58 - DNA, 20 bp, Artificial Sequence
  Synthetic
gcgccucugaguccaggucu

SEQ ID NO: 59 - DNA, 20 bp, Artificial Sequence
  Synthetic
agcgccucugaguccagguc

SEQ ID NO: 60 - DNA, 20 bp, Artificial Sequence
  Synthetic
cuagcagcgccucugagucc

SEQ ID NO: 61 - DNA, 20 bp, Artificial Sequence
  Synthetic
cuucugcaccagcugaggca

SEQ ID NO: 62 - DNA, 20 bp, Artificial Sequence
  Synthetic
uguaacuucugcaccagcug

SEQ ID NO: 63 - DNA, 20 bp, Artificial Sequence
  Synthetic
ggugaagagcacggccucag

SEQ ID NO: 64 - DNA, 20 bp, Artificial Sequence
  Synthetic
ggccgugcucuucaccuaug

SEQ ID NO: 65 - DNA, 20 bp, Artificial Sequence
  Synthetic
gccgugcucuucaccuaugu

SEQ ID NO: 66 - DNA, 20 bp, Artificial Sequence
  Synthetic
ucccacauaggugaagagca

SEQ ID NO: 67 - DNA, 20 bp, Artificial Sequence
  Synthetic
gcucuucaccuaugugggaa

SEQ ID NO: 68 - DNA, 20 bp, Artificial Sequence
  Synthetic
uggccuuaccuuucccacau

SEQ ID NO: 69 - DNA, 26 bp, Artificial Sequence
  Synthetic
gcaaaacccggactggatcagccggg

SEQ ID NO: 70 - DNA, 26 bp, Artificial Sequence
  Synthetic
cgcaaaacccggactggatcagccgg

SEQ ID NO: 71 - DNA, 26 bp, Artificial Sequence
  Synthetic
cggctgatccagtccgggttttgcgg

SEQ ID NO: 72 - DNA, 26 bp, Artificial Sequence
  Synthetic
ctgatccagtccgggttttgcggcgg

SEQ ID NO: 73 - DNA, 26 bp, Artificial Sequence
  Synthetic
ccgctccgccgcaaaacccggactgg

SEQ ID NO: 74 - DNA, 26 bp, Artificial Sequence
  Synthetic
cagtccgggttttgcggcggagcggg

SEQ ID NO: 75 - DNA, 26 bp, Artificial Sequence
  Synthetic
gcctggcgcctccggggtcgccctgg

SEQ ID NO: 76 - DNA, 26 bp, Artificial Sequence
  Synthetic
gccagggcgaccccggaggcgccagg

SEQ ID NO: 77 - DNA, 26 bp, Artificial Sequence
  Synthetic
gcagcaggccagggcgaccccggagg

SEQ ID NO: 78 - DNA, 26 bp, Artificial Sequence
  Synthetic
gaagcagcaggccagggcgaccccgg

SEQ ID NO: 79 - DNA, 26 bp, Artificial Sequence
  Synthetic
ggtcgccctggcctgctgcttcgtgg

SEQ ID NO: 80 - DNA, 26 bp, Artificial Sequence
  Synthetic
cgccctggcctgctgcttcgtggcgg

SEQ ID NO: 81 - DNA, 26 bp, Artificial Sequence
  Synthetic
cgccgccacgaagcagcaggccaggg

SEQ ID NO: 82 - DNA, 26 bp, Artificial Sequence
  Synthetic
ccgccgccacgaagcagcaggccagg

SEQ ID NO: 83 - DNA, 26 bp, Artificial Sequence
  Synthetic
cctggcctgctgcttcgtggcggcgg

SEQ ID NO: 84 - DNA, 26 bp, Artificial Sequence
  Synthetic
cacggccgccgccacgaagcagcagg

SEQ ID NO: 85 - DNA, 26 bp, Artificial Sequence
  Synthetic
ctgctgcttcgtggcggcggccgtgg

SEQ ID NO: 86 - DNA, 26 bp, Artificial Sequence
  Synthetic
tggcggcggccgtggccctgcgctgg

SEQ ID NO: 87 - DNA, 26 bp, Artificial Sequence
  Synthetic
gcggccgtggccctgcgctggtccgg

SEQ ID NO: 88 - DNA, 26 bp, Artificial Sequence
  Synthetic
cggccgtggccctgcgctggtccggg

SEQ ID NO: 89 - DNA, 26 bp, Artificial Sequence
  Synthetic
gcgcccggaccagcgcagggccacgg

SEQ ID NO: 90 - DNA, 26 bp, Artificial Sequence
  Synthetic
tggccctgcgctggtccgggcgccgg

SEQ ID NO: 91 - DNA, 26 bp, Artificial Sequence
  Synthetic
ccgctcgctgcctctgtcgcgcccgg

SEQ ID NO: 92 - DNA, 26 bp, Artificial Sequence
  Synthetic
ggcggcgcagcgcttccggctccagg

SEQ ID NO: 93 - DNA, 26 bp, Artificial Sequence
  Synthetic
tgagtccaggtctgggttctgtgggg

SEQ ID NO: 94 - DNA, 26 bp, Artificial Sequence
  Synthetic
ctgagtccaggtctgggttctgtggg

SEQ ID NO: 95 - DNA, 26 bp, Artificial Sequence
  Synthetic
tctgagtccaggtctgggttctgtgg

SEQ ID NO: 96 - DNA, 26 bp, Artificial Sequence
  Synthetic
acagaacccagacctggactcagagg

SEQ ID NO: 97 - DNA, 26 bp, Artificial Sequence
  Synthetic
gcagcgcctctgagtccaggtctggg

SEQ ID NO: 98 - DNA, 26 bp, Artificial Sequence
  Synthetic
agcagcgcctctgagtccaggtctgg

SEQ ID NO: 99 - DNA, 26 bp, Artificial Sequence
  Synthetic
gggctagcagcgcctctgagtccagg

SEQ ID NO: 100 - DNA, 26 bp, Artificial Sequence
  Synthetic
aacttctgcaccagctgaggcagggg

SEQ ID NO: 101 - DNA, 26 bp, Artificial Sequence
  Synthetic
gtaacttctgcaccagctgaggcagg

SEQ ID NO: 102 - DNA, 26 bp, Artificial Sequence
  Synthetic
ctgtgtaacttctgcaccagctgagg

SEQ ID NO: 103 - DNA, 26 bp, Artificial Sequence
  Synthetic
ataggtgaagagcacggcctcagggg

SEQ ID NO: 104 - DNA, 26 bp, Artificial Sequence
  Synthetic
acataggtgaagagcacggcctcagg

SEQ ID NO: 105 - DNA, 26 bp, Artificial Sequence
  Synthetic
tgaggccgtgctcttcacctatgtgg

SEQ ID NO: 106 - DNA, 26 bp, Artificial Sequence
  Synthetic
gaggccgtgctcttcacctatgtggg

SEQ ID NO: 107 - DNA, 26 bp, Artificial Sequence
  Synthetic
ctttcccacataggtgaagagcacgg

SEQ ID NO: 108 - DNA, 26 bp, Artificial Sequence
  Synthetic
cgtgctcttcacctatgtgggaaagg

SEQ ID NO: 109 - DNA, 22 bp, Artificial Sequence
  Synthetic
gcaaaacccggacuggaucagc

SEQ ID NO: 110 - DNA, 22 bp, Artificial Sequence
  Synthetic
cgcaaaacccggacuggaucag

SEQ ID NO: 111 - DNA, 22 bp, Artificial Sequence
  Synthetic
cggcugauccaguccggguuuu

SEQ ID NO: 112 - DNA, 22 bp, Artificial Sequence
  Synthetic
cugauccaguccggguuuugcg

SEQ ID NO: 113 - DNA, 22 bp, Artificial Sequence
  Synthetic
ccgcuccgccgcaaaacccgga

SEQ ID NO: 114 - DNA, 22 bp, Artificial Sequence
  Synthetic
caguccggguuuugcggcggag

SEQ ID NO: 115 - DNA, 22 bp, Artificial Sequence
  Synthetic
gccuggcgccuccggggucgcc

SEQ ID NO: 116 - DNA, 22 bp, Artificial Sequence
  Synthetic
gccagggcgaccccggaggcgc

SEQ ID NO: 117 - DNA, 22 bp, Artificial Sequence
  Synthetic
gcagcaggccagggcgaccccg

SEQ ID NO: 118 - DNA, 22 bp, Artificial Sequence
  Synthetic
gaagcagcaggccagggcgacc

SEQ ID NO: 119 - DNA, 22 bp, Artificial Sequence
  Synthetic
ggucgcccuggccugcugcuuc

SEQ ID NO: 120 - DNA, 22 bp, Artificial Sequence
  Synthetic
cgcccuggccugcugcuucgug

SEQ ID NO: 121 - DNA, 22 bp, Artificial Sequence
  Synthetic
cgccgccacgaagcagcaggcc

SEQ ID NO: 122 - DNA, 22 bp, Artificial Sequence
  Synthetic
ccgccgccacgaagcagcaggc

SEQ ID NO: 123 - DNA, 22 bp, Artificial Sequence
  Synthetic
ccuggccugcugcuucguggcg

SEQ ID NO: 124 - DNA, 22 bp, Artificial Sequence
  Synthetic
cacggccgccgccacgaagcag

SEQ ID NO: 125 - DNA, 22 bp, Artificial Sequence
  Synthetic
cugcugcuucguggcggcggcc

SEQ ID NO: 126 - DNA, 22 bp, Artificial Sequence
  Synthetic
uggcggcggccguggcccugcg

SEQ ID NO: 127 - DNA, 22 bp, Artificial Sequence
  Synthetic
gcggccguggcccugcgcuggu

SEQ ID NO: 128 - DNA, 22 bp, Artificial Sequence
  Synthetic
cggccguggcccugcgcugguc

SEQ ID NO: 129 - DNA, 22 bp, Artificial Sequence
  Synthetic
gcgcccggaccagcgcagggcc

SEQ ID NO: 130 - DNA, 22 bp, Artificial Sequence
  Synthetic
uggcccugcgcugguccgggcg

SEQ ID NO: 131 - DNA, 22 bp, Artificial Sequence
  Synthetic
ccgcucgcugccucugucgcgc

SEQ ID NO: 132 - DNA, 22 bp, Artificial Sequence
  Synthetic
ggcggcgcagcgcuuccggcuc

SEQ ID NO: 133 - DNA, 22 bp, Artificial Sequence
  Synthetic
ugaguccaggucuggguucugu

SEQ ID NO: 134 - DNA, 22 bp, Artificial Sequence
  Synthetic
cugaguccaggucuggguucug

SEQ ID NO: 135 - DNA, 22 bp, Artificial Sequence
  Synthetic
ucugaguccaggucuggguucu

SEQ ID NO: 136 - DNA, 22 bp, Artificial Sequence
  Synthetic
acagaacccagaccuggacuca

SEQ ID NO: 137 - DNA, 22 bp, Artificial Sequence
  Synthetic
gcagcgccucugaguccagguc

SEQ ID NO: 138 - DNA, 22 bp, Artificial Sequence
  Synthetic
agcagcgccucugaguccaggu

SEQ ID NO: 139 - DNA, 22 bp, Artificial Sequence
  Synthetic
gggcuagcagcgccucugaguc

SEQ ID NO: 140 - DNA, 22 bp, Artificial Sequence
  Synthetic
aacuucugcaccagcugaggca

SEQ ID NO: 141 - DNA, 22 bp, Artificial Sequence
  Synthetic
guaacuucugcaccagcugagg

SEQ ID NO: 142 - DNA, 22 bp, Artificial Sequence
  Synthetic
cuguguaacuucugcaccagcu

SEQ ID NO: 143 - DNA, 22 bp, Artificial Sequence
  Synthetic
auaggugaagagcacggccuca

SEQ ID NO: 144 - DNA, 22 bp, Artificial Sequence
  Synthetic
acauaggugaagagcacggccu

SEQ ID NO: 145 - DNA, 22 bp, Artificial Sequence
  Synthetic
ugaggccgugcucuucaccuau

SEQ ID NO: 146 - DNA, 22 bp, Artificial Sequence
  Synthetic
gaggccgugcucuucaccuaug

SEQ ID NO: 147 - DNA, 22 bp, Artificial Sequence
  Synthetic
cuuucccacauaggugaagagc

SEQ ID NO: 148 - DNA, 22 bp, Artificial Sequence
  Synthetic
cgugcucuucaccuauguggga

SEQ ID NO: 149 - DNA, 27 bp, Artificial Sequence
  Synthetic
tgggatcccggctgatccagtccgggt

SEQ ID NO: 150 - DNA, 27 bp, Artificial Sequence
  Synthetic
caaaacccggactggatcagccgggat

SEQ ID NO: 151 - DNA, 27 bp, Artificial Sequence
  Synthetic
cgctccgccgcaaaacccggactggat

SEQ ID NO: 152 - DNA, 27 bp, Artificial Sequence
  Synthetic
ggccgcgctgcctggcgcctccggggt

SEQ ID NO: 153 - DNA, 27 bp, Artificial Sequence
  Synthetic
caggtgactgccggagcgtagtgggat

SEQ ID NO: 154 - DNA, 27 bp, Artificial Sequence
  Synthetic
tgggttctgtggggaacaaactcggat

SEQ ID NO: 155 - DNA, 27 bp, Artificial Sequence
  Synthetic
gcagcgcctctgagtccaggtctgggt

SEQ ID NO: 156 - DNA, 27 bp, Artificial Sequence
  Synthetic
ggggcagggctagcagcgcctctgagt

SEQ ID NO: 157 - DNA, 27 bp, Artificial Sequence
  Synthetic
tggagtcctggccctgggaggagggat

SEQ ID NO: 158 - DNA, 27 bp, Artificial Sequence
  Synthetic
gactccacgctgggcttgagcctgaat

SEQ ID NO: 159 - DNA, 27 bp, Artificial Sequence
  Synthetic
cattcaggctcaagcccagcgtggagt

SEQ ID NO: 160 - DNA, 27 bp, Artificial Sequence
  Synthetic
gctgggcttgagcctgaatgaaggggt

SEQ ID NO: 161 - DNA, 27 bp, Artificial Sequence
  Synthetic
gcctgaatgaaggggtgccggcggagt

SEQ ID NO: 162 - DNA, 27 bp, Artificial Sequence
  Synthetic
gtggtgcatgtgctgaagctgcagggt

SEQ ID NO: 163 - DNA, 27 bp, Artificial Sequence
  Synthetic
gttccacagtccatgttcaggttgggt

SEQ ID NO: 164 - DNA, 27 bp, Artificial Sequence
  Synthetic
gtccatgttcaggttgggtcttggggt

SEQ ID NO: 165 - DNA, 21 bp, Artificial Sequence
  Synthetic
ugggaucccggcugauccagu

SEQ ID NO: 166 - DNA, 21 bp, Artificial Sequence
  Synthetic
caaaacccggacuggaucagc

SEQ ID NO: 167 - DNA, 21 bp, Artificial Sequence
  Synthetic
cgcuccgccgcaaaacccgga

SEQ ID NO: 168 - DNA, 21 bp, Artificial Sequence
  Synthetic
ggccgcgcugccuggcgccuc

SEQ ID NO: 169 - DNA, 21 bp, Artificial Sequence
  Synthetic
caggugacugccggagcguag

SEQ ID NO: 170 - DNA, 21 bp, Artificial Sequence
  Synthetic
uggguucuguggggaacaaac

SEQ ID NO: 171 - DNA, 21 bp, Artificial Sequence
  Synthetic
gcagcgccucugaguccaggu

SEQ ID NO: 172 - DNA, 21 bp, Artificial Sequence
  Synthetic
ggggcagggcuagcagcgccu

SEQ ID NO: 173 - DNA, 21 bp, Artificial Sequence
  Synthetic
uggaguccuggcccugggagg

SEQ ID NO: 174 - DNA, 21 bp, Artificial Sequence
  Synthetic
gacuccacgcugggcuugagc

SEQ ID NO: 175 - DNA, 21 bp, Artificial Sequence
  Synthetic
cauucaggcucaagcccagcg

SEQ ID NO: 176 - DNA, 21 bp, Artificial Sequence
  Synthetic
gcugggcuugagccugaauga

SEQ ID NO: 177 - DNA, 21 bp, Artificial Sequence
  Synthetic
gccugaaugaaggggugccgg

SEQ ID NO: 178 - DNA, 21 bp, Artificial Sequence
  Synthetic
guggugcaugugcugaagcug

SEQ ID NO: 179 - DNA, 21 bp, Artificial Sequence
  Synthetic
guuccacaguccauguucagg

SEQ ID NO: 180 - DNA, 21 bp, Artificial Sequence
  Synthetic
guccauguucagguugggucu

SEQ ID NO: 181 - DNA, 23 bp, Artificial Sequence
  Synthetic
ttgtagcattatcactctctgag

SEQ ID NO: 182 - DNA, 23 bp, Artificial Sequence
  Synthetic
cagagagtgataatgctacaaag

SEQ ID NO: 183 - DNA, 23 bp, Artificial Sequence
  Synthetic
actatgagccatctactttctgg

SEQ ID NO: 184 - DNA, 23 bp, Artificial Sequence
  Synthetic
ctatgagccatctactttctggg

SEQ ID NO: 185 - DNA, 23 bp, Artificial Sequence
  Synthetic
tgaagtgcccagaaagtagatgg

SEQ ID NO: 186 - DNA, 23 bp, Artificial Sequence
  Synthetic
agggttcacagaggattaaatgg

SEQ ID NO: 187 - DNA, 23 bp, Artificial Sequence
  Synthetic
atcctctgtgaaccctatgatgg

SEQ ID NO: 188 - DNA, 23 bp, Artificial Sequence
  Synthetic
ttctggccatcgtactcactggg

SEQ ID NO: 189 - DNA, 23 bp, Artificial Sequence
  Synthetic
cttctggccatcgtactcactgg

SEQ ID NO: 190 - DNA, 23 bp, Artificial Sequence
  Synthetic
gatttgtgctctcactcttctgg

SEQ ID NO: 191 - DNA, 23 bp, Artificial Sequence
  Synthetic
ggcagtagccaccagcacactgg

SEQ ID NO: 192 - DNA, 23 bp, Artificial Sequence
  Synthetic
agatgtccagtctggagcccagg

SEQ ID NO: 193 - DNA, 23 bp, Artificial Sequence
  Synthetic
attgttggagatgtccagtctgg

SEQ ID NO: 194 - DNA, 23 bp, Artificial Sequence
  Synthetic
atctccaacaatctttcacatgg

SEQ ID NO: 195 - DNA, 23 bp, Artificial Sequence
  Synthetic
actgccatgtgaaagattgttgg

SEQ ID NO: 196 - DNA, 23 bp, Artificial Sequence
  Synthetic
caatctttcacatggcagttagg

SEQ ID NO: 197 - DNA, 23 bp, Artificial Sequence
  Synthetic
cataacaaggcttctggacttgg

SEQ ID NO: 198 - DNA, 23 bp, Artificial Sequence
  Synthetic
gcaggtcataacaaggcttctgg

SEQ ID NO: 199 - DNA, 23 bp, Artificial Sequence
  Synthetic
aagccttgttatgacctgcaagg

SEQ ID NO: 200 - DNA, 23 bp, Artificial Sequence
  Synthetic
tggccttgcaggtcataacaagg

SEQ ID NO: 201 - DNA, 23 bp, Artificial Sequence
  Synthetic
caggttaatcatggccttgcagg

SEQ ID NO: 202 - DNA, 23 bp, Artificial Sequence
  Synthetic
ctgcagggtcaggttaatcatgg

SEQ ID NO: 203 - DNA, 23 bp, Artificial Sequence
  Synthetic
gattaacctgaccctgcagctgg

SEQ ID NO: 204 - DNA, 23 bp, Artificial Sequence
  Synthetic
gtgctcacagcccggccacgtgg

SEQ ID NO: 205 - DNA, 23 bp, Artificial Sequence
  Synthetic
agcccggccacgtggcctgcagg

SEQ ID NO: 206 - DNA, 23 bp, Artificial Sequence
  Synthetic
tacctgcaggccacgtggccggg

SEQ ID NO: 207 - DNA, 23 bp, Artificial Sequence
  Synthetic
ttacctgcaggccacgtggccgg

SEQ ID NO: 208 - DNA, 23 bp, Artificial Sequence
  Synthetic
aacattacctgcaggccacgtgg

SEQ ID NO: 209 - DNA, 23 bp, Artificial Sequence
  Synthetic
gtgttctgaacattacctgcagg

SEQ ID NO: 210 - DNA, 23 bp, Artificial Sequence
  Synthetic
ctcttggtgcttgctgtgcctgg

SEQ ID NO: 211 - DNA, 23 bp, Artificial Sequence
  Synthetic
tgtgcctggagtgttgttcctgg

SEQ ID NO: 212 - DNA, 23 bp, Artificial Sequence
  Synthetic
gtgcctggagtgttgttcctggg

SEQ ID NO: 213 - DNA, 23 bp, Artificial Sequence
  Synthetic
acgagtaggtggtctttaggtgg

SEQ ID NO: 214 - DNA, 23 bp, Artificial Sequence
  Synthetic
aaagaccacctactcgtccaagg

SEQ ID NO: 215 - DNA, 23 bp, Artificial Sequence
  Synthetic
tggacgagtaggtggtctttagg

SEQ ID NO: 216 - DNA, 23 bp, Artificial Sequence
  Synthetic
cacctactcgtccaaggtgaggg

SEQ ID NO: 217 - DNA, 23 bp, Artificial Sequence
  Synthetic
cctcaccttggacgagtaggtgg

SEQ ID NO: 218 - DNA, 23 bp, Artificial Sequence
  Synthetic
tgccctcaccttggacgagtagg

SEQ ID NO: 219 - DNA, 23 bp, Artificial Sequence
  Synthetic
tcaacacagcctgacagagttgg

SEQ ID NO: 220 - DNA, 23 bp, Artificial Sequence
  Synthetic
acccaacatctgttaggctgtgg

SEQ ID NO: 221 - DNA, 23 bp, Artificial Sequence
  Synthetic
tccacagcctaacagatgttggg

SEQ ID NO: 222 - DNA, 23 bp, Artificial Sequence
  Synthetic
tgtaggtcacgccctttccttgg

SEQ ID NO: 223 - DNA, 23 bp, Artificial Sequence
  Synthetic
aactaaagatacatctggctggg

SEQ ID NO: 224 - DNA, 23 bp, Artificial Sequence
  Synthetic
gaactaaagatacatctggctgg

SEQ ID NO: 225 - DNA, 23 bp, Artificial Sequence
  Synthetic
atgtgaactaaagatacatctgg

SEQ ID NO: 226 - DNA, 23 bp, Artificial Sequence
  Synthetic
tttctctggctgggcttagctgg

SEQ ID NO: 227 - DNA, 23 bp, Artificial Sequence
  Synthetic
ttctctggctgggcttagctggg

SEQ ID NO: 228 - DNA, 23 bp, Artificial Sequence
  Synthetic
tatgtgtaggaaacttgggaggg

SEQ ID NO: 229 - DNA, 23 bp, Artificial Sequence
  Synthetic
ctatgtgtaggaaacttgggagg

SEQ ID NO: 230 - DNA, 23 bp, Artificial Sequence
  Synthetic
aatctatgtgtaggaaacttggg

SEQ ID NO: 231 - DNA, 23 bp, Artificial Sequence
  Synthetic
aaggtgaagccacttgggatcgg

SEQ ID NO: 232 - DNA, 23 bp, Artificial Sequence
  Synthetic
tccattcaacaagccttctctgg

SEQ ID NO: 233 - DNA, 23 bp, Artificial Sequence
  Synthetic
aggcttgttgaatggagcaatgg

SEQ ID NO: 234 - DNA, 23 bp, Artificial Sequence
  Synthetic
ggcttgttgaatggagcaatggg

SEQ ID NO: 235 - DNA, 23 bp, Artificial Sequence
  Synthetic
gcaatgggtgacttgttattagg

SEQ ID NO: 236 - DNA, 23 bp, Artificial Sequence
  Synthetic
caatgggtgacttgttattaggg

SEQ ID NO: 237 - DNA, 23 bp, Artificial Sequence
  Synthetic
gcaaagggtcagggactgattgg

SEQ ID NO: 238 - DNA, 23 bp, Artificial Sequence
  Synthetic
atgggcactaatcaagatcatgg

SEQ ID NO: 239 - DNA, 23 bp, Artificial Sequence
  Synthetic
gatcttgattagtgcccatgagg

SEQ ID NO: 240 - DNA, 23 bp, Artificial Sequence
  Synthetic
tgggaattatttgtcctcatggg

SEQ ID NO: 241 - DNA, 23 bp, Artificial Sequence
  Synthetic
ctgggaattatttgtcctcatgg

SEQ ID NO: 242 - DNA, 23 bp, Artificial Sequence
  Synthetic
ctataggttgaatgtagactggg

SEQ ID NO: 243 - DNA, 23 bp, Artificial Sequence
  Synthetic
gctataggttgaatgtagactgg

SEQ ID NO: 244 - DNA, 23 bp, Artificial Sequence
  Synthetic
ttcaacctatagctttctcctgg

SEQ ID NO: 245 - DNA, 23 bp, Artificial Sequence
  Synthetic
acagaccaggagaaagctatagg

SEQ ID NO: 246 - DNA, 23 bp, Artificial Sequence
  Synthetic
tagatgaggatctacagaccagg

SEQ ID NO: 247 - DNA, 23 bp, Artificial Sequence
  Synthetic
atccaacatccgttaggctgtgg

SEQ ID NO: 248 - DNA, 23 bp, Artificial Sequence
  Synthetic
ggttcaactccacagcctaacgg

SEQ ID NO: 249 - DNA, 23 bp, Artificial Sequence
  Synthetic
ggttgctctctgaacaacaatgg

SEQ ID NO: 250 - DNA, 23 bp, Artificial Sequence
  Synthetic
gctctctgaacaacaatggaggg

SEQ ID NO: 251 - DNA, 23 bp, Artificial Sequence
  Synthetic
ggttaccctgaacatactgtggg

SEQ ID NO: 252 - DNA, 23 bp, Artificial Sequence
  Synthetic
tggttaccctgaacatactgtgg

SEQ ID NO: 253 - DNA, 23 bp, Artificial Sequence
  Synthetic
aggcagggactatttctgattgg

SEQ ID NO: 254 - DNA, 23 bp, Artificial Sequence
  Synthetic
tacatttgatgtctgtttcctgg

SEQ ID NO: 255 - DNA, 23 bp, Artificial Sequence
  Synthetic
gtttattctcataatacccaggg

SEQ ID NO: 256 - DNA, 23 bp, Artificial Sequence
  Synthetic
ggtttattctcataatacccagg

SEQ ID NO: 257 - DNA, 23 bp, Artificial Sequence
  Synthetic
ggaatgagtgtgtttcaaggagg

SEQ ID NO: 258 - DNA, 23 bp, Artificial Sequence
  Synthetic
atgctgctgatttactcttgagg

SEQ ID NO: 259 - DNA, 23 bp, Artificial Sequence
  Synthetic
tttactcttgaggagatcactgg

SEQ ID NO: 260 - DNA, 23 bp, Artificial Sequence
  Synthetic
ttactcttgaggagatcactggg

SEQ ID NO: 261 - DNA, 23 bp, Artificial Sequence
  Synthetic
ttagggagggtgtaaatctgagg

SEQ ID NO: 262 - DNA, 23 bp, Artificial Sequence
  Synthetic
tagggagggtgtaaatctgaggg

SEQ ID NO: 263 - DNA, 23 bp, Artificial Sequence
  Synthetic
gagctagcagcaacgcacagagg

SEQ ID NO: 264 - DNA, 23 bp, Artificial Sequence
  Synthetic
agctagcagcaacgcacagaggg

SEQ ID NO: 265 - DNA, 23 bp, Artificial Sequence
  Synthetic
atgaggtatgtggtaacggaagg

SEQ ID NO: 266 - DNA, 23 bp, Artificial Sequence
  Synthetic
tgaggtatgtggtaacggaaggg

SEQ ID NO: 267 - DNA, 23 bp, Artificial Sequence
  Synthetic
gtaacggaagggtgtaacccagg

SEQ ID NO: 268 - DNA, 23 bp, Artificial Sequence
  Synthetic
aggcctagagtgctgtgccgtgg

SEQ ID NO: 269 - DNA, 23 bp, Artificial Sequence
  Synthetic
ggcctagagtgctgtgccgtggg

SEQ ID NO: 270 - DNA, 23 bp, Artificial Sequence
  Synthetic
atcccacggcacagcactctagg

SEQ ID NO: 271 - DNA, 23 bp, Artificial Sequence
  Synthetic
gagtgctgtgccgtgggatgtgg

SEQ ID NO: 272 - DNA, 23 bp, Artificial Sequence
  Synthetic
ctgtgccgtgggatgtggtgcgg

SEQ ID NO: 273 - DNA, 23 bp, Artificial Sequence
  Synthetic
tgtgccgtgggatgtggtgcggg

SEQ ID NO: 274 - DNA, 23 bp, Artificial Sequence
  Synthetic
gtcacccgcaccacatcccacgg

SEQ ID NO: 275 - DNA, 23 bp, Artificial Sequence
  Synthetic
gatgtggtgcgggtgacaagtgg

SEQ ID NO: 276 - DNA, 23 bp, Artificial Sequence
  Synthetic
ggtgcgggtgacaagtggcctgg

SEQ ID NO: 277 - DNA, 23 bp, Artificial Sequence
  Synthetic
gtgcgggtgacaagtggcctggg

SEQ ID NO: 278 - DNA, 23 bp, Artificial Sequence
  Synthetic
ggagttcatgaaggtggagtggg

SEQ ID NO: 279 - DNA, 23 bp, Artificial Sequence
  Synthetic
gttacagagtgggcaacttcagg

SEQ ID NO: 280 - DNA, 23 bp, Artificial Sequence
  Synthetic
ttacagagtgggcaacttcaggg

SEQ ID NO: 281 - DNA, 23 bp, Artificial Sequence
  Synthetic
agacaaacatagactgagcctgg

SEQ ID NO: 282 - DNA, 23 bp, Artificial Sequence
  Synthetic
gacaaacatagactgagcctggg

SEQ ID NO: 283 - DNA, 23 bp, Artificial Sequence
  Synthetic
gacgggttgtcacatcctccagg

SEQ ID NO: 284 - DNA, 23 bp, Artificial Sequence
  Synthetic
aggatgtgacaacccgtctctgg

SEQ ID NO: 285 - DNA, 23 bp, Artificial Sequence
  Synthetic
ggatgtgacaacccgtctctggg

SEQ ID NO: 286 - DNA, 23 bp, Artificial Sequence
  Synthetic
gggatgggctcatggtctctcgg

SEQ ID NO: 287 - DNA, 23 bp, Artificial Sequence
  Synthetic
tgatgatggtggactcagtctgg

SEQ ID NO: 288 - DNA, 23 bp, Artificial Sequence
  Synthetic
gatgatggtggactcagtctggg

SEQ ID NO: 289 - DNA, 23 bp, Artificial Sequence
  Synthetic
gtggactcagtctgggagcccgg

SEQ ID NO: 290 - DNA, 23 bp, Artificial Sequence
  Synthetic
gactcagtctgggagcccggagg

SEQ ID NO: 291 - DNA, 23 bp, Artificial Sequence
  Synthetic
agtctgggagcccggaggtaggg

SEQ ID NO: 292 - DNA, 23 bp, Artificial Sequence
  Synthetic
gaggtgctgttcccatgctttgg

SEQ ID NO: 293 - DNA, 23 bp, Artificial Sequence
  Synthetic
aagcatgggaacagcacctcagg

SEQ ID NO: 294 - DNA, 23 bp, Artificial Sequence
  Synthetic
actcaggaactccaaagcatggg

SEQ ID NO: 295 - DNA, 23 bp, Artificial Sequence
  Synthetic
gggccatcaatcaccatccaggg

SEQ ID NO: 296 - DNA, 23 bp, Artificial Sequence
  Synthetic
tcctcctcatcaaccagggaggg

SEQ ID NO: 297 - DNA, 23 bp, Artificial Sequence
  Synthetic
ttcctcctcatcaaccagggagg

SEQ ID NO: 298 - DNA, 23 bp, Artificial Sequence
  Synthetic
gacttcctcctcatcaaccaggg

SEQ ID NO: 299 - DNA, 23 bp, Artificial Sequence
  Synthetic
tggttgatgaggaggaagtctgg

SEQ ID NO: 300 - DNA, 23 bp, Artificial Sequence
  Synthetic
agacttcctcctcatcaaccagg

SEQ ID NO: 301 - DNA, 23 bp, Artificial Sequence
  Synthetic
ggttgatgaggaggaagtctggg

SEQ ID NO: 302 - DNA, 23 bp, Artificial Sequence
  Synthetic
aggaggaagtctgggctaatggg

SEQ ID NO: 303 - DNA, 23 bp, Artificial Sequence
  Synthetic
tctgggctaatgggttgcagtgg

SEQ ID NO: 304 - DNA, 23 bp, Artificial Sequence
  Synthetic
acccaccaccgcacacagatggg

SEQ ID NO: 305 - DNA, 23 bp, Artificial Sequence
  Synthetic
tacccaccaccgcacacagatgg

SEQ ID NO: 306 - DNA, 23 bp, Artificial Sequence
  Synthetic
gggtatagcttcctttactgcgg

SEQ ID NO: 307 - DNA, 23 bp, Artificial Sequence
  Synthetic
tgctttcttgtgcctcctgctgg

SEQ ID NO: 308 - DNA, 23 bp, Artificial Sequence
  Synthetic
gctggcatttcattgtgttgtgg

SEQ ID NO: 309 - DNA, 23 bp, Artificial Sequence
  Synthetic
gttgtggttggttgtgtgtctgg

SEQ ID NO: 310 - DNA, 23 bp, Artificial Sequence
  Synthetic
tggctgtgtggttatgtgcctgg

SEQ ID NO: 311 - DNA, 23 bp, Artificial Sequence
  Synthetic
tgtgtggttatgtgcctggctgg

SEQ ID NO: 312 - DNA, 23 bp, Artificial Sequence
  Synthetic
gtgtgcatgtgttgggttattgg

SEQ ID NO: 313 - DNA, 23 bp, Artificial Sequence
  Synthetic
gcatgtgttgggttattggttgg

SEQ ID NO: 314 - DNA, 23 bp, Artificial Sequence
  Synthetic
tgtgtacatctagctatgtgtgg

SEQ ID NO: 315 - DNA, 23 bp, Artificial Sequence
  Synthetic
ctagctatgtgtggctggtgtgg

SEQ ID NO: 316 - DNA, 23 bp, Artificial Sequence
  Synthetic
tagctatgtgtggctggtgtggg

SEQ ID NO: 317 - DNA, 23 bp, Artificial Sequence
  Synthetic
ctggtgtgggtctgaatgtctgg

SEQ ID NO: 318 - DNA, 23 bp, Artificial Sequence
  Synthetic
cagctggtttggtatgtgtctgg

SEQ ID NO: 319 - DNA, 23 bp, Artificial Sequence
  Synthetic
agctggtttggtatgtgtctggg

SEQ ID NO: 320 - DNA, 23 bp, Artificial Sequence
  Synthetic
ttggtatgtgtctgggcatctgg

SEQ ID NO: 321 - DNA, 23 bp, Artificial Sequence
  Synthetic
gcatctggttggtgaacatgtgg

SEQ ID NO: 322 - DNA, 23 bp, Artificial Sequence
  Synthetic
ttggtgaacatgtggatgtctgg

SEQ ID NO: 323 - DNA, 23 bp, Artificial Sequence
  Synthetic
tggtgaacatgtggatgtctggg

SEQ ID NO: 324 - DNA, 23 bp, Artificial Sequence
  Synthetic
catgtggatgtctgggctgttgg

SEQ ID NO: 325 - DNA, 23 bp, Artificial Sequence
  Synthetic
atgtggatgtctgggctgttggg

SEQ ID NO: 326 - DNA, 23 bp, Artificial Sequence
  Synthetic
ggatgtctgggctgttgggctgg

SEQ ID NO: 327 - DNA, 23 bp, Artificial Sequence
  Synthetic
gatgtctgggctgttgggctggg

SEQ ID NO: 328 - DNA, 23 bp, Artificial Sequence
  Synthetic
gtatatgtctggatggctggagg

SEQ ID NO: 329 - DNA, 23 bp, Artificial Sequence
  Synthetic
gtgtctccagcctcccattgtgg

SEQ ID NO: 330 - DNA, 23 bp, Artificial Sequence
  Synthetic
cagcctcccattgtggtttcagg

SEQ ID NO: 331 - DNA, 23 bp, Artificial Sequence
  Synthetic
cattgtggtttcaggcttcttgg

SEQ ID NO: 332 - DNA, 23 bp, Artificial Sequence
  Synthetic
acagacctgtatagcttgttggg

SEQ ID NO: 333 - DNA, 23 bp, Artificial Sequence
  Synthetic
gacagacctgtatagcttgttgg

SEQ ID NO: 334 - DNA, 23 bp, Artificial Sequence
  Synthetic
acatgactgagaaggtgcccagg

SEQ ID NO: 335 - DNA, 23 bp, Artificial Sequence
  Synthetic
agtgacaacctcgagacctcagg

SEQ ID NO: 336 - DNA, 23 bp, Artificial Sequence
  Synthetic
ggtggacacctgaggtctcgagg

SEQ ID NO: 337 - DNA, 23 bp, Artificial Sequence
  Synthetic
aggtgtccacctttatgtcccgg

SEQ ID NO: 338 - DNA, 23 bp, Artificial Sequence
  Synthetic
ggtgtccacctttatgtcccggg

SEQ ID NO: 339 - DNA, 23 bp, Artificial Sequence
  Synthetic
atttgtttgctgagcctgtgagg

SEQ ID NO: 340 - DNA, 23 bp, Artificial Sequence
  Synthetic
aagacctggagaaattccctggg

SEQ ID NO: 341 - DNA, 23 bp, Artificial Sequence
  Synthetic
caagacctggagaaattccctgg

SEQ ID NO: 342 - DNA, 23 bp, Artificial Sequence
  Synthetic
tttagcacaagtgtgagtcaggg

SEQ ID NO: 343 - DNA, 23 bp, Artificial Sequence
  Synthetic
tcaccagttctgtgggcatctgg

SEQ ID NO: 344 - DNA, 23 bp, Artificial Sequence
  Synthetic
aggagggtggctggtctgtctgg

SEQ ID NO: 345 - DNA, 23 bp, Artificial Sequence
  Synthetic
agctcactcaccacccgtctggg

SEQ ID NO: 346 - DNA, 23 bp, Artificial Sequence
  Synthetic
cagctcactcaccacccgtctgg

SEQ ID NO: 347 - DNA, 23 bp, Artificial Sequence
  Synthetic
ctgaacctcatggcacctgtagg

SEQ ID NO: 348 - DNA, 23 bp, Artificial Sequence
  Synthetic
gaaacgagaaaggcagtaccagg

SEQ ID NO: 349 - DNA, 23 bp, Artificial Sequence
  Synthetic
aaacgagaaaggcagtaccaggg

SEQ ID NO: 350 - DNA, 23 bp, Artificial Sequence
  Synthetic
cgagaaaggcagtaccagggagg

SEQ ID NO: 351 - DNA, 23 bp, Artificial Sequence
  Synthetic
acagaaacactgcctcatctggg

SEQ ID NO: 352 - DNA, 23 bp, Artificial Sequence
  Synthetic
ataatattcctaggacccattgg

SEQ ID NO: 353 - DNA, 23 bp, Artificial Sequence
  Synthetic
taatattcctaggacccattggg

SEQ ID NO: 354 - DNA, 23 bp, Artificial Sequence
  Synthetic
cctaggacccattgggtaaatgg

SEQ ID NO: 355 - DNA, 23 bp, Artificial Sequence
  Synthetic
ccatttacccaatgggtcctagg

SEQ ID NO: 356 - DNA, 23 bp, Artificial Sequence
  Synthetic
agctggtccatttacccaatggg

SEQ ID NO: 357 - DNA, 23 bp, Artificial Sequence
  Synthetic
cagctggtccatttacccaatgg

SEQ ID NO: 358 - DNA, 23 bp, Artificial Sequence
  Synthetic
gtaaatggaccagctgctcatgg

SEQ ID NO: 359 - DNA, 23 bp, Artificial Sequence
  Synthetic
atggaccagctgctcatggctgg

SEQ ID NO: 360 - DNA, 23 bp, Artificial Sequence
  Synthetic
tgctcaagctactcatggccagg

SEQ ID NO: 361 - DNA, 23 bp, Artificial Sequence
  Synthetic
taattagaagttgtctagcatgg

SEQ ID NO: 362 - DNA, 23 bp, Artificial Sequence
  Synthetic
tgtggcttctgttgttgggctgg

SEQ ID NO: 363 - DNA, 23 bp, Artificial Sequence
  Synthetic
gtgtaagtgtttgctgggtttgg

SEQ ID NO: 364 - DNA, 23 bp, Artificial Sequence
  Synthetic
atttaagtgtaagtgtttgctgg

SEQ ID NO: 365 - DNA, 23 bp, Artificial Sequence
  Synthetic
taaatgtttacagtggtgcctgg

SEQ ID NO: 366 - DNA, 20 bp, Artificial Sequence
  Synthetic
uuguagcauuaucacucucu

SEQ ID NO: 367 - DNA, 20 bp, Artificial Sequence
  Synthetic
cagagagugauaaugcuaca

SEQ ID NO: 368 - DNA, 20 bp, Artificial Sequence
  Synthetic
acuaugagccaucuacuuuc

SEQ ID NO: 369 - DNA, 20 bp, Artificial Sequence
  Synthetic
cuaugagccaucuacuuucu

SEQ ID NO: 370 - DNA, 20 bp, Artificial Sequence
  Synthetic
ugaagugcccagaaaguaga

SEQ ID NO: 371 - DNA, 20 bp, Artificial Sequence
  Synthetic
aggguucacagaggauuaaa

SEQ ID NO: 372 - DNA, 20 bp, Artificial Sequence
  Synthetic
auccucugugaacccuauga

SEQ ID NO: 373 - DNA, 20 bp, Artificial Sequence
  Synthetic
uucuggccaucguacucacu

SEQ ID NO: 374 - DNA, 20 bp, Artificial Sequence
  Synthetic
cuucuggccaucguacucac

SEQ ID NO: 375 - DNA, 20 bp, Artificial Sequence
  Synthetic
gauuugugcucucacucuuc

SEQ ID NO: 376 - DNA, 20 bp, Artificial Sequence
  Synthetic
ggcaguagccaccagcacac

SEQ ID NO: 377 - DNA, 20 bp, Artificial Sequence
  Synthetic
agauguccagucuggagccc

SEQ ID NO: 378 - DNA, 20 bp, Artificial Sequence
  Synthetic
auuguuggagauguccaguc

SEQ ID NO: 379 - DNA, 20 bp, Artificial Sequence
  Synthetic
aucuccaacaaucuuucaca

SEQ ID NO: 380 - DNA, 20 bp, Artificial Sequence
  Synthetic
acugccaugugaaagauugu

SEQ ID NO: 381 - DNA, 20 bp, Artificial Sequence
  Synthetic
caaucuuucacauggcaguu

SEQ ID NO: 382 - DNA, 20 bp, Artificial Sequence
  Synthetic
cauaacaaggcuucuggacu

SEQ ID NO: 383 - DNA, 20 bp, Artificial Sequence
  Synthetic
gcaggucauaacaaggcuuc

SEQ ID NO: 384 - DNA, 20 bp, Artificial Sequence
  Synthetic
aagccuuguuaugaccugca

SEQ ID NO: 385 - DNA, 20 bp, Artificial Sequence
  Synthetic
uggccuugcaggucauaaca

SEQ ID NO: 386 - DNA, 20 bp, Artificial Sequence
  Synthetic
cagguuaaucauggccuugc

SEQ ID NO: 387 - DNA, 20 bp, Artificial Sequence
  Synthetic
cugcagggucagguuaauca

SEQ ID NO: 388 - DNA, 20 bp, Artificial Sequence
  Synthetic
gauuaaccugacccugcagc

SEQ ID NO: 389 - DNA, 20 bp, Artificial Sequence
  Synthetic
gugcucacagcccggccacg

SEQ ID NO: 390 - DNA, 20 bp, Artificial Sequence
  Synthetic
agcccggccacguggccugc

SEQ ID NO: 391 - DNA, 20 bp, Artificial Sequence
  Synthetic
uaccugcaggccacguggcc

SEQ ID NO: 392 - DNA, 20 bp, Artificial Sequence
  Synthetic
uuaccugcaggccacguggc

SEQ ID NO: 393 - DNA, 20 bp, Artificial Sequence
  Synthetic
aacauuaccugcaggccacg

SEQ ID NO: 394 - DNA, 20 bp, Artificial Sequence
  Synthetic
guguucugaacauuaccugc

SEQ ID NO: 395 - DNA, 20 bp, Artificial Sequence
  Synthetic
cucuuggugcuugcugugcc

SEQ ID NO: 396 - DNA, 20 bp, Artificial Sequence
  Synthetic
ugugccuggaguguuguucc

SEQ ID NO: 397 - DNA, 20 bp, Artificial Sequence
  Synthetic
gugccuggaguguuguuccu

SEQ ID NO: 398 - DNA, 20 bp, Artificial Sequence
  Synthetic
acgaguagguggucuuuagg

SEQ ID NO: 399 - DNA, 20 bp, Artificial Sequence
  Synthetic
aaagaccaccuacucgucca

SEQ ID NO: 400 - DNA, 20 bp, Artificial Sequence
  Synthetic
uggacgaguagguggucuuu

SEQ ID NO: 401 - DNA, 20 bp, Artificial Sequence
  Synthetic
caccuacucguccaagguga

SEQ ID NO: 402 - DNA, 20 bp, Artificial Sequence
  Synthetic
ccucaccuuggacgaguagg

SEQ ID NO: 403 - DNA, 20 bp, Artificial Sequence
  Synthetic
ugcccucaccuuggacgagu

SEQ ID NO: 404 - DNA, 20 bp, Artificial Sequence
  Synthetic
ucaacacagccugacagagu

SEQ ID NO: 405 - DNA, 20 bp, Artificial Sequence
  Synthetic
acccaacaucuguuaggcug

SEQ ID NO: 406 - DNA, 20 bp, Artificial Sequence
  Synthetic
uccacagccuaacagauguu

SEQ ID NO: 407 - DNA, 20 bp, Artificial Sequence
  Synthetic
uguaggucacgcccuuuccu

SEQ ID NO: 408 - DNA, 20 bp, Artificial Sequence
  Synthetic
aacuaaagauacaucuggcu

SEQ ID NO: 409 - DNA, 20 bp, Artificial Sequence
  Synthetic
gaacuaaagauacaucuggc

SEQ ID NO: 410 - DNA, 20 bp, Artificial Sequence
  Synthetic
augugaacuaaagauacauc

SEQ ID NO: 411 - DNA, 20 bp, Artificial Sequence
  Synthetic
uuucucuggcugggcuuagc

SEQ ID NO: 412 - DNA, 20 bp, Artificial Sequence
  Synthetic
uucucuggcugggcuuagcu

SEQ ID NO: 413 - DNA, 20 bp, Artificial Sequence
  Synthetic
uauguguaggaaacuuggga

SEQ ID NO: 414 - DNA, 20 bp, Artificial Sequence
  Synthetic
cuauguguaggaaacuuggg

SEQ ID NO: 415 - DNA, 20 bp, Artificial Sequence
  Synthetic
aaucuauguguaggaaacuu

SEQ ID NO: 416 - DNA, 20 bp, Artificial Sequence
  Synthetic
aaggugaagccacuugggau

SEQ ID NO: 417 - DNA, 20 bp, Artificial Sequence
  Synthetic
uccauucaacaagccuucuc

SEQ ID NO: 418 - DNA, 20 bp, Artificial Sequence
  Synthetic
aggcuuguugaauggagcaa

SEQ ID NO: 419 - DNA, 20 bp, Artificial Sequence
  Synthetic
ggcuuguugaauggagcaau

SEQ ID NO: 420 - DNA, 20 bp, Artificial Sequence
  Synthetic
gcaaugggugacuuguuauu

SEQ ID NO: 421 - DNA, 20 bp, Artificial Sequence
  Synthetic
caaugggugacuuguuauua

SEQ ID NO: 422 - DNA, 20 bp, Artificial Sequence
  Synthetic
gcaaagggucagggacugau

SEQ ID NO: 423 - DNA, 20 bp, Artificial Sequence
  Synthetic
augggcacuaaucaagauca

SEQ ID NO: 424 - DNA, 20 bp, Artificial Sequence
  Synthetic
gaucuugauuagugcccaug

SEQ ID NO: 425 - DNA, 20 bp, Artificial Sequence
  Synthetic
ugggaauuauuuguccucau

SEQ ID NO: 426 - DNA, 20 bp, Artificial Sequence
  Synthetic
cugggaauuauuuguccuca

SEQ ID NO: 427 - DNA, 20 bp, Artificial Sequence
  Synthetic
cuauagguugaauguagacu

SEQ ID NO: 428 - DNA, 20 bp, Artificial Sequence
  Synthetic
gcuauagguugaauguagac

SEQ ID NO: 429 - DNA, 20 bp, Artificial Sequence
  Synthetic
uucaaccuauagcuuucucc

SEQ ID NO: 430 - DNA, 20 bp, Artificial Sequence
  Synthetic
acagaccaggagaaagcuau

SEQ ID NO: 431 - DNA, 20 bp, Artificial Sequence
  Synthetic
uagaugaggaucuacagacc

SEQ ID NO: 432 - DNA, 20 bp, Artificial Sequence
  Synthetic
auccaacauccguuaggcug

SEQ ID NO: 433 - DNA, 20 bp, Artificial Sequence
  Synthetic
gguucaacuccacagccuaa

SEQ ID NO: 434 - DNA, 20 bp, Artificial Sequence
  Synthetic
gguugcucucugaacaacaa

SEQ ID NO: 435 - DNA, 20 bp, Artificial Sequence
  Synthetic
gcucucugaacaacaaugga

SEQ ID NO: 436 - DNA, 20 bp, Artificial Sequence
  Synthetic
gguuacccugaacauacugu

SEQ ID NO: 437 - DNA, 20 bp, Artificial Sequence
  Synthetic
ugguuacccugaacauacug

SEQ ID NO: 438 - DNA, 20 bp, Artificial Sequence
  Synthetic
aggcagggacuauuucugau

SEQ ID NO: 439 - DNA, 20 bp, Artificial Sequence
  Synthetic
uacauuugaugucuguuucc

SEQ ID NO: 440 - DNA, 20 bp, Artificial Sequence
  Synthetic
guuuauucucauaauaccca

SEQ ID NO: 441 - DNA, 20 bp, Artificial Sequence
  Synthetic
gguuuauucucauaauaccc

SEQ ID NO: 442 - DNA, 20 bp, Artificial Sequence
  Synthetic
ggaaugaguguguuucaagg

SEQ ID NO: 443 - DNA, 20 bp, Artificial Sequence
  Synthetic
augcugcugauuuacucuug

SEQ ID NO: 444 - DNA, 20 bp, Artificial Sequence
  Synthetic
uuuacucuugaggagaucac

SEQ ID NO: 445 - DNA, 20 bp, Artificial Sequence
  Synthetic
uuacucuugaggagaucacu

SEQ ID NO: 446 - DNA, 20 bp, Artificial Sequence
  Synthetic
uuagggaggguguaaaucug

SEQ ID NO: 447 - DNA, 20 bp, Artificial Sequence
  Synthetic
uagggaggguguaaaucuga

SEQ ID NO: 448 - DNA, 20 bp, Artificial Sequence
  Synthetic
gagcuagcagcaacgcacag

SEQ ID NO: 449 - DNA, 20 bp, Artificial Sequence
  Synthetic
agcuagcagcaacgcacaga

SEQ ID NO: 450 - DNA, 20 bp, Artificial Sequence
  Synthetic
augagguaugugguaacgga

SEQ ID NO: 451 - DNA, 20 bp, Artificial Sequence
  Synthetic
ugagguaugugguaacggaa

SEQ ID NO: 452 - DNA, 20 bp, Artificial Sequence
  Synthetic
guaacggaaggguguaaccc

SEQ ID NO: 453 - DNA, 20 bp, Artificial Sequence
  Synthetic
aggccuagagugcugugccg

SEQ ID NO: 454 - DNA, 20 bp, Artificial Sequence
  Synthetic
ggccuagagugcugugccgu

SEQ ID NO: 455 - DNA, 20 bp, Artificial Sequence
  Synthetic
aucccacggcacagcacucu

SEQ ID NO: 456 - DNA, 20 bp, Artificial Sequence
  Synthetic
gagugcugugccgugggaug

SEQ ID NO: 457 - DNA, 20 bp, Artificial Sequence
  Synthetic
cugugccgugggauguggug

SEQ ID NO: 458 - DNA, 20 bp, Artificial Sequence
  Synthetic
ugugccgugggauguggugc

SEQ ID NO: 459 - DNA, 20 bp, Artificial Sequence
  Synthetic
gucacccgcaccacauccca

SEQ ID NO: 460 - DNA, 20 bp, Artificial Sequence
  Synthetic
gauguggugcgggugacaag

SEQ ID NO: 461 - DNA, 20 bp, Artificial Sequence
  Synthetic
ggugcgggugacaaguggcc

SEQ ID NO: 462 - DNA, 20 bp, Artificial Sequence
  Synthetic
gugcgggugacaaguggccu

SEQ ID NO: 463 - DNA, 20 bp, Artificial Sequence
  Synthetic
ggaguucaugaagguggagu

SEQ ID NO: 464 - DNA, 20 bp, Artificial Sequence
  Synthetic
guuacagagugggcaacuuc

SEQ ID NO: 465 - DNA, 20 bp, Artificial Sequence
  Synthetic
uuacagagugggcaacuuca

SEQ ID NO: 466 - DNA, 20 bp, Artificial Sequence
  Synthetic
agacaaacauagacugagcc

SEQ ID NO: 467 - DNA, 20 bp, Artificial Sequence
  Synthetic
gacaaacauagacugagccu

SEQ ID NO: 468 - DNA, 20 bp, Artificial Sequence
  Synthetic
gacggguugucacauccucc

SEQ ID NO: 469 - DNA, 20 bp, Artificial Sequence
  Synthetic
aggaugugacaacccgucuc

SEQ ID NO: 470 - DNA, 20 bp, Artificial Sequence
  Synthetic
ggaugugacaacccgucucu

SEQ ID NO: 471 - DNA, 20 bp, Artificial Sequence
  Synthetic
gggaugggcucauggucucu

SEQ ID NO: 472 - DNA, 20 bp, Artificial Sequence
  Synthetic
ugaugaugguggacucaguc

SEQ ID NO: 473 - DNA, 20 bp, Artificial Sequence
  Synthetic
gaugaugguggacucagucu

SEQ ID NO: 474 - DNA, 20 bp, Artificial Sequence
  Synthetic
guggacucagucugggagcc

SEQ ID NO: 475 - DNA, 20 bp, Artificial Sequence
  Synthetic
gacucagucugggagcccgg

SEQ ID NO: 476 - DNA, 20 bp, Artificial Sequence
  Synthetic
agucugggagcccggaggua

SEQ ID NO: 477 - DNA, 20 bp, Artificial Sequence
  Synthetic
gaggugcuguucccaugcuu

SEQ ID NO: 478 - DNA, 20 bp, Artificial Sequence
  Synthetic
aagcaugggaacagcaccuc

SEQ ID NO: 479 - DNA, 20 bp, Artificial Sequence
  Synthetic
acucaggaacuccaaagcau

SEQ ID NO: 480 - DNA, 20 bp, Artificial Sequence
  Synthetic
gggccaucaaucaccaucca

SEQ ID NO: 481 - DNA, 20 bp, Artificial Sequence
  Synthetic
uccuccucaucaaccaggga

SEQ ID NO: 482 - DNA, 20 bp, Artificial Sequence
  Synthetic
uuccuccucaucaaccaggg

SEQ ID NO: 483 - DNA, 20 bp, Artificial Sequence
  Synthetic
gacuuccuccucaucaacca

SEQ ID NO: 484 - DNA, 20 bp, Artificial Sequence
  Synthetic
ugguugaugaggaggaaguc

SEQ ID NO: 485 - DNA, 20 bp, Artificial Sequence
  Synthetic
agacuuccuccucaucaacc

SEQ ID NO: 486 - DNA, 20 bp, Artificial Sequence
  Synthetic
gguugaugaggaggaagucu

SEQ ID NO: 487 - DNA, 20 bp, Artificial Sequence
  Synthetic
aggaggaagucugggcuaau

SEQ ID NO: 488 - DNA, 20 bp, Artificial Sequence
  Synthetic
ucugggcuaauggguugcag

SEQ ID NO: 489 - DNA, 20 bp, Artificial Sequence
  Synthetic
acccaccaccgcacacagau

SEQ ID NO: 490 - DNA, 20 bp, Artificial Sequence
  Synthetic
uacccaccaccgcacacaga

SEQ ID NO: 491 - DNA, 20 bp, Artificial Sequence
  Synthetic
ggguauagcuuccuuuacug

SEQ ID NO: 492 - DNA, 20 bp, Artificial Sequence
  Synthetic
ugcuuucuugugccuccugc

SEQ ID NO: 493 - DNA, 20 bp, Artificial Sequence
  Synthetic
gcuggcauuucauuguguug

SEQ ID NO: 494 - DNA, 20 bp, Artificial Sequence
  Synthetic
guugugguugguuguguguc

SEQ ID NO: 495 - DNA, 20 bp, Artificial Sequence
  Synthetic
uggcugugugguuaugugcc

SEQ ID NO: 496 - DNA, 20 bp, Artificial Sequence
  Synthetic
ugugugguuaugugccuggc

SEQ ID NO: 497 - DNA, 20 bp, Artificial Sequence
  Synthetic
gugugcauguguuggguuau

SEQ ID NO: 498 - DNA, 20 bp, Artificial Sequence
  Synthetic
gcauguguuggguuauuggu

SEQ ID NO: 499 - DNA, 20 bp, Artificial Sequence
  Synthetic
uguguacaucuagcuaugug

SEQ ID NO: 500 - DNA, 20 bp, Artificial Sequence
  Synthetic
cuagcuauguguggcuggug

SEQ ID NO: 501 - DNA, 20 bp, Artificial Sequence
  Synthetic
uagcuauguguggcuggugu

SEQ ID NO: 502 - DNA, 20 bp, Artificial Sequence
  Synthetic
cuggugugggucugaauguc

SEQ ID NO: 503 - DNA, 20 bp, Artificial Sequence
  Synthetic
cagcugguuugguauguguc

SEQ ID NO: 504 - DNA, 20 bp, Artificial Sequence
  Synthetic
agcugguuugguaugugucu

SEQ ID NO: 505 - DNA, 20 bp, Artificial Sequence
  Synthetic
uugguaugugucugggcauc

SEQ ID NO: 506 - DNA, 20 bp, Artificial Sequence
  Synthetic
gcaucugguuggugaacaug

SEQ ID NO: 507 - DNA, 20 bp, Artificial Sequence
  Synthetic
uuggugaacauguggauguc

SEQ ID NO: 508 - DNA, 20 bp, Artificial Sequence
  Synthetic
uggugaacauguggaugucu

SEQ ID NO: 509 - DNA, 20 bp, Artificial Sequence
  Synthetic
cauguggaugucugggcugu

SEQ ID NO: 510 - DNA, 20 bp, Artificial Sequence
  Synthetic
auguggaugucugggcuguu

SEQ ID NO: 511 - DNA, 20 bp, Artificial Sequence
  Synthetic
ggaugucugggcuguugggc

SEQ ID NO: 512 - DNA, 20 bp, Artificial Sequence
  Synthetic
gaugucugggcuguugggcu

SEQ ID NO: 513 - DNA, 20 bp, Artificial Sequence
  Synthetic
guauaugucuggauggcugg

SEQ ID NO: 514 - DNA, 20 bp, Artificial Sequence
  Synthetic
gugucuccagccucccauug

SEQ ID NO: 515 - DNA, 20 bp, Artificial Sequence
  Synthetic
cagccucccauugugguuuc

SEQ ID NO: 516 - DNA, 20 bp, Artificial Sequence
  Synthetic
cauugugguuucaggcuucu

SEQ ID NO: 517 - DNA, 20 bp, Artificial Sequence
  Synthetic
acagaccuguauagcuuguu

SEQ ID NO: 518 - DNA, 20 bp, Artificial Sequence
  Synthetic
gacagaccuguauagcuugu

SEQ ID NO: 519 - DNA, 20 bp, Artificial Sequence
  Synthetic
acaugacugagaaggugccc

SEQ ID NO: 520 - DNA, 20 bp, Artificial Sequence
  Synthetic
agugacaaccucgagaccuc

SEQ ID NO: 521 - DNA, 20 bp, Artificial Sequence
  Synthetic
gguggacaccugaggucucg

SEQ ID NO: 522 - DNA, 20 bp, Artificial Sequence
  Synthetic
agguguccaccuuuaugucc

SEQ ID NO: 523 - DNA, 20 bp, Artificial Sequence
  Synthetic
gguguccaccuuuauguccc

SEQ ID NO: 524 - DNA, 20 bp, Artificial Sequence
  Synthetic
auuuguuugcugagccugug

SEQ ID NO: 525 - DNA, 20 bp, Artificial Sequence
  Synthetic
aagaccuggagaaauucccu

SEQ ID NO: 526 - DNA, 20 bp, Artificial Sequence
  Synthetic
caagaccuggagaaauuccc

SEQ ID NO: 527 - DNA, 20 bp, Artificial Sequence
  Synthetic
uuuagcacaagugugaguca

SEQ ID NO: 528 - DNA, 20 bp, Artificial Sequence
  Synthetic
ucaccaguucugugggcauc

SEQ ID NO: 529 - DNA, 20 bp, Artificial Sequence
  Synthetic
aggaggguggcuggucuguc

SEQ ID NO: 530 - DNA, 20 bp, Artificial Sequence
  Synthetic
agcucacucaccacccgucu

SEQ ID NO: 531 - DNA, 20 bp, Artificial Sequence
  Synthetic
cagcucacucaccacccguc

SEQ ID NO: 532 - DNA, 20 bp, Artificial Sequence
  Synthetic
cugaaccucauggcaccugu

SEQ ID NO: 533 - DNA, 20 bp, Artificial Sequence
  Synthetic
gaaacgagaaaggcaguacc

SEQ ID NO: 534 - DNA, 20 bp, Artificial Sequence
  Synthetic
aaacgagaaaggcaguacca

SEQ ID NO: 535 - DNA, 20 bp, Artificial Sequence
  Synthetic
cgagaaaggcaguaccaggg

SEQ ID NO: 536 - DNA, 20 bp, Artificial Sequence
  Synthetic
acagaaacacugccucaucu

SEQ ID NO: 537 - DNA, 20 bp, Artificial Sequence
  Synthetic
auaauauuccuaggacccau

SEQ ID NO: 538 - DNA, 20 bp, Artificial Sequence
  Synthetic
uaauauuccuaggacccauu

SEQ ID NO: 539 - DNA, 20 bp, Artificial Sequence
  Synthetic
ccuaggacccauuggguaaa

SEQ ID NO: 540 - DNA, 20 bp, Artificial Sequence
  Synthetic
ccauuuacccaauggguccu

SEQ ID NO: 541 - DNA, 20 bp, Artificial Sequence
  Synthetic
agcugguccauuuacccaau

SEQ ID NO: 542 - DNA, 20 bp, Artificial Sequence
  Synthetic
cagcugguccauuuacccaa

SEQ ID NO: 543 - DNA, 20 bp, Artificial Sequence
  Synthetic
guaaauggaccagcugcuca

SEQ ID NO: 544 - DNA, 20 bp, Artificial Sequence
  Synthetic
auggaccagcugcucauggc

SEQ ID NO: 545 - DNA, 20 bp, Artificial Sequence
  Synthetic
ugcucaagcuacucauggcc

SEQ ID NO: 546 - DNA, 20 bp, Artificial Sequence
  Synthetic
uaauuagaaguugucuagca

SEQ ID NO: 547 - DNA, 20 bp, Artificial Sequence
  Synthetic
uguggcuucuguuguugggc

SEQ ID NO: 548 - DNA, 20 bp, Artificial Sequence
  Synthetic
guguaaguguuugcuggguu

SEQ ID NO: 549 - DNA, 20 bp, Artificial Sequence
  Synthetic
auuuaaguguaaguguuugc

SEQ ID NO: 550 - DNA, 20 bp, Artificial Sequence
  Synthetic
uaaauguuuacaguggugcc

SEQ ID NO: 551 - DNA, 26 bp, Artificial Sequence
  Synthetic
cctactatgagccatctactttctgg

SEQ ID NO: 552 - DNA, 26 bp, Artificial Sequence
  Synthetic
ctactatgagccatctactttctggg

SEQ ID NO: 553 - DNA, 26 bp, Artificial Sequence
  Synthetic
ctgtgaagtgcccagaaagtagatgg

SEQ ID NO: 554 - DNA, 26 bp, Artificial Sequence
  Synthetic
catagggttcacagaggattaaatgg

SEQ ID NO: 555 - DNA, 26 bp, Artificial Sequence
  Synthetic
ttaatcctctgtgaaccctatgatgg

SEQ ID NO: 556 - DNA, 26 bp, Artificial Sequence
  Synthetic
taatcctctgtgaaccctatgatggg

SEQ ID NO: 557 - DNA, 26 bp, Artificial Sequence
  Synthetic
ccagggtcccacagctagaagttggg

SEQ ID NO: 558 - DNA, 26 bp, Artificial Sequence
  Synthetic
actcttctggccatcgtactcactgg

SEQ ID NO: 559 - DNA, 26 bp, Artificial Sequence
  Synthetic
gctgatttgtgctctcactcttctgg

SEQ ID NO: 560 - DNA, 26 bp, Artificial Sequence
  Synthetic
ggcagtagccaccagcacactggtgg

SEQ ID NO: 561 - DNA, 26 bp, Artificial Sequence
  Synthetic
acaggcagtagccaccagcacactgg

SEQ ID NO: 562 - DNA, 26 bp, Artificial Sequence
  Synthetic
cctcgcttccctgggctccagactgg

SEQ ID NO: 563 - DNA, 26 bp, Artificial Sequence
  Synthetic
ccagtctggagcccagggaagcgagg

SEQ ID NO: 564 - DNA, 26 bp, Artificial Sequence
  Synthetic
ggagatgtccagtctggagcccaggg

SEQ ID NO: 565 - DNA, 26 bp, Artificial Sequence
  Synthetic
tggagatgtccagtctggagcccagg

SEQ ID NO: 566 - DNA, 26 bp, Artificial Sequence
  Synthetic
aagattgttggagatgtccagtctgg

SEQ ID NO: 567 - DNA, 26 bp, Artificial Sequence
  Synthetic
gacatctccaacaatctttcacatgg

SEQ ID NO: 568 - DNA, 26 bp, Artificial Sequence
  Synthetic
caacaatctttcacatggcagttagg

SEQ ID NO: 569 - DNA, 26 bp, Artificial Sequence
  Synthetic
ctaactgccatgtgaaagattgttgg

SEQ ID NO: 570 - DNA, 26 bp, Artificial Sequence
  Synthetic
ggtcataacaaggcttctggacttgg

SEQ ID NO: 571 - DNA, 26 bp, Artificial Sequence
  Synthetic
cagaagccttgttatgacctgcaagg

SEQ ID NO: 572 - DNA, 26 bp, Artificial Sequence
  Synthetic
cttgcaggtcataacaaggcttctgg

SEQ ID NO: 573 - DNA, 26 bp, Artificial Sequence
  Synthetic
tcatggccttgcaggtcataacaagg

SEQ ID NO: 574 - DNA, 26 bp, Artificial Sequence
  Synthetic
ggtcaggttaatcatggccttgcagg

SEQ ID NO: 575 - DNA, 26 bp, Artificial Sequence
  Synthetic
catgattaacctgaccctgcagctgg

SEQ ID NO: 576 - DNA, 26 bp, Artificial Sequence
  Synthetic
cagctgcagggtcaggttaatcatgg

SEQ ID NO: 577 - DNA, 26 bp, Artificial Sequence
  Synthetic
gcccttcctcagtgctcacagcccgg

SEQ ID NO: 578 - DNA, 26 bp, Artificial Sequence
  Synthetic
gccgggctgtgagcactgaggaaggg

SEQ ID NO: 579 - DNA, 26 bp, Artificial Sequence
  Synthetic
acgtggccgggctgtgagcactgagg

SEQ ID NO: 580 - DNA, 26 bp, Artificial Sequence
  Synthetic
tcagtgctcacagcccggccacgtgg

SEQ ID NO: 581 - DNA, 26 bp, Artificial Sequence
  Synthetic
cacagcccggccacgtggcctgcagg

SEQ ID NO: 582 - DNA, 26 bp, Artificial Sequence
  Synthetic
cattacctgcaggccacgtggccggg

SEQ ID NO: 583 - DNA, 26 bp, Artificial Sequence
  Synthetic
acattacctgcaggccacgtggccgg

SEQ ID NO: 584 - DNA, 26 bp, Artificial Sequence
  Synthetic
ctgaacattacctgcaggccacgtgg

SEQ ID NO: 585 - DNA, 26 bp, Artificial Sequence
  Synthetic
tcggtgttctgaacattacctgcagg

SEQ ID NO: 586 - DNA, 26 bp, Artificial Sequence
  Synthetic
gcacagcaagcaccaagagcaaaggg

SEQ ID NO: 587 - DNA, 26 bp, Artificial Sequence
  Synthetic
ggcacagcaagcaccaagagcaaagg

SEQ ID NO: 588 - DNA, 26 bp, Artificial Sequence
  Synthetic
ttgctcttggtgcttgctgtgcctgg

SEQ ID NO: 589 - DNA, 26 bp, Artificial Sequence
  Synthetic
tgctgtgcctggagtgttgttcctgg

SEQ ID NO: 590 - DNA, 26 bp, Artificial Sequence
  Synthetic
gctgtgcctggagtgttgttcctggg

SEQ ID NO: 591 - DNA, 26 bp, Artificial Sequence
  Synthetic
tggacgagtaggtggtctttaggtgg

SEQ ID NO: 592 - DNA, 26 bp, Artificial Sequence
  Synthetic
cctaaagaccacctactcgtccaagg

SEQ ID NO: 593 - DNA, 26 bp, Artificial Sequence
  Synthetic
ccttggacgagtaggtggtctttagg

SEQ ID NO: 594 - DNA, 26 bp, Artificial Sequence
  Synthetic
agaccacctactcgtccaaggtgagg

SEQ ID NO: 595 - DNA, 26 bp, Artificial Sequence
  Synthetic
gaccacctactcgtccaaggtgaggg

SEQ ID NO: 596 - DNA, 26 bp, Artificial Sequence
  Synthetic
tgccctcaccttggacgagtaggtgg

SEQ ID NO: 597 - DNA, 26 bp, Artificial Sequence
  Synthetic
aattgccctcaccttggacgagtagg

SEQ ID NO: 598 - DNA, 26 bp, Artificial Sequence
  Synthetic
ctttcaacacagcctgacagagttgg

SEQ ID NO: 599 - DNA, 26 bp, Artificial Sequence
  Synthetic
attaatagaacccaacatctgttagg

SEQ ID NO: 600 - DNA, 26 bp, Artificial Sequence
  Synthetic
agaacccaacatctgttaggctgtgg

SEQ ID NO: 601 - DNA, 26 bp, Artificial Sequence
  Synthetic
aactccacagcctaacagatgttggg

SEQ ID NO: 602 - DNA, 26 bp, Artificial Sequence
  Synthetic
agttgaatacccattatctcatttgg

SEQ ID NO: 603 - DNA, 26 bp, Artificial Sequence
  Synthetic
tagttagggagggtgtaaatctgagg

SEQ ID NO: 604 - DNA, 26 bp, Artificial Sequence
  Synthetic
agttagggagggtgtaaatctgaggg

SEQ ID NO: 605 - DNA, 26 bp, Artificial Sequence
  Synthetic
gacttagcatgttaaatgctgctagg

SEQ ID NO: 606 - DNA, 26 bp, Artificial Sequence
  Synthetic
aaagagctagcagcaacgcacagagg

SEQ ID NO: 607 - DNA, 26 bp, Artificial Sequence
  Synthetic
aagagctagcagcaacgcacagaggg

SEQ ID NO: 608 - DNA, 26 bp, Artificial Sequence
  Synthetic
gggggaagtcaaggtaggaatggagg

SEQ ID NO: 609 - DNA, 26 bp, Artificial Sequence
  Synthetic
ggggaagtcaaggtaggaatggaggg

SEQ ID NO: 610 - DNA, 26 bp, Artificial Sequence
  Synthetic
ctcttcagtgaagaaatgatggcagg

SEQ ID NO: 611 - DNA, 26 bp, Artificial Sequence
  Synthetic
gtatctcttcagtgaagaaatgatgg

SEQ ID NO: 612 - DNA, 26 bp, Artificial Sequence
  Synthetic
aaaatgaggtatgtggtaacggaagg

SEQ ID NO: 613 - DNA, 26 bp, Artificial Sequence
  Synthetic
aaatgaggtatgtggtaacggaaggg

SEQ ID NO: 614 - DNA, 26 bp, Artificial Sequence
  Synthetic
gtggtaacggaagggtgtaacccagg

SEQ ID NO: 615 - DNA, 26 bp, Artificial Sequence
  Synthetic
acgaggcctagagtgctgtgccgtgg

SEQ ID NO: 616 - DNA, 26 bp, Artificial Sequence
  Synthetic
cgaggcctagagtgctgtgccgtggg

SEQ ID NO: 617 - DNA, 26 bp, Artificial Sequence
  Synthetic
ctagagtgctgtgccgtgggatgtgg

SEQ ID NO: 618 - DNA, 26 bp, Artificial Sequence
  Synthetic
cacatcccacggcacagcactctagg

SEQ ID NO: 619 - DNA, 26 bp, Artificial Sequence
  Synthetic
gtgctgtgccgtgggatgtggtgcgg

SEQ ID NO: 620 - DNA, 26 bp, Artificial Sequence
  Synthetic
tgctgtgccgtgggatgtggtgcggg

SEQ ID NO: 621 - DNA, 26 bp, Artificial Sequence
  Synthetic
cttgtcacccgcaccacatcccacgg

SEQ ID NO: 622 - DNA, 26 bp, Artificial Sequence
  Synthetic
tgggatgtggtgcgggtgacaagtgg

SEQ ID NO: 623 - DNA, 26 bp, Artificial Sequence
  Synthetic
tgtggtgcgggtgacaagtggcctgg

SEQ ID NO: 624 - DNA, 26 bp, Artificial Sequence
  Synthetic
gtggtgcgggtgacaagtggcctggg

SEQ ID NO: 625 - DNA, 26 bp, Artificial Sequence
  Synthetic
actcagtctgggagcccggaggtagg

SEQ ID NO: 626 - DNA, 26 bp, Artificial Sequence
  Synthetic
ctcagtctgggagcccggaggtaggg

SEQ ID NO: 627 - DNA, 26 bp, Artificial Sequence
  Synthetic
cctgaggtgctgttcccatgctttgg

SEQ ID NO: 628 - DNA, 26 bp, Artificial Sequence
  Synthetic
ccaaagcatgggaacagcacctcagg

SEQ ID NO: 629 - DNA, 26 bp, Artificial Sequence
  Synthetic
gacactcaggaactccaaagcatggg

SEQ ID NO: 630 - DNA, 26 bp, Artificial Sequence
  Synthetic
ggacactcaggaactccaaagcatgg

SEQ ID NO: 631 - DNA, 26 bp, Artificial Sequence
  Synthetic
ctcagacagagaagctgcccattggg

SEQ ID NO: 632 - DNA, 26 bp, Artificial Sequence
  Synthetic
actcagacagagaagctgcccattgg

SEQ ID NO: 633 - DNA, 26 bp, Artificial Sequence
  Synthetic
gagtatgtgtattaatattaattagg

SEQ ID NO: 634 - DNA, 26 bp, Artificial Sequence
  Synthetic
acttcctcctcatcaaccagggaggg

SEQ ID NO: 635 - DNA, 26 bp, Artificial Sequence
  Synthetic
gacttcctcctcatcaaccagggagg

SEQ ID NO: 636 - DNA, 26 bp, Artificial Sequence
  Synthetic
ccctggttgatgaggaggaagtctgg

SEQ ID NO: 637 - DNA, 26 bp, Artificial Sequence
  Synthetic
cctggttgatgaggaggaagtctggg

SEQ ID NO: 638 - DNA, 26 bp, Artificial Sequence
  Synthetic
ccagacttcctcctcatcaaccaggg

SEQ ID NO: 639 - DNA, 26 bp, Artificial Sequence
  Synthetic
cccagacttcctcctcatcaaccagg

SEQ ID NO: 640 - DNA, 26 bp, Artificial Sequence
  Synthetic
atgaggaggaagtctgggctaatggg

SEQ ID NO: 641 - DNA, 26 bp, Artificial Sequence
  Synthetic
aagtctgggctaatgggttgcagtgg

SEQ ID NO: 642 - DNA, 26 bp, Artificial Sequence
  Synthetic
tatacccaccaccgcacacagatggg

SEQ ID NO: 643 - DNA, 26 bp, Artificial Sequence
  Synthetic
ctatacccaccaccgcacacagatgg

SEQ ID NO: 644 - DNA, 26 bp, Artificial Sequence
  Synthetic
ggtgggtatagcttcctttactgcgg

SEQ ID NO: 645 - DNA, 26 bp, Artificial Sequence
  Synthetic
gcctgctttcttgtgcctcctgctgg

SEQ ID NO: 646 - DNA, 26 bp, Artificial Sequence
  Synthetic
cctgctggcatttcattgtgttgtgg

SEQ ID NO: 647 - DNA, 26 bp, Artificial Sequence
  Synthetic
ccacaacacaatgaaatgccagcagg

SEQ ID NO: 648 - DNA, 26 bp, Artificial Sequence
  Synthetic
ctggcatttcattgtgttgtggttgg

SEQ ID NO: 649 - DNA, 26 bp, Artificial Sequence
  Synthetic
tgtggttggttgtgtgtctggtctgg

SEQ ID NO: 650 - DNA, 26 bp, Artificial Sequence
  Synthetic
gttgtgtgtctggtctggctgtgtgg

SEQ ID NO: 651 - DNA, 26 bp, Artificial Sequence
  Synthetic
gtctggctgtgtggttatgtgcctgg

SEQ ID NO: 652 - DNA, 26 bp, Artificial Sequence
  Synthetic
ggctgtgtggttatgtgcctggctgg

SEQ ID NO: 653 - DNA, 26 bp, Artificial Sequence
  Synthetic
gctgtgtggttatgtgcctggctggg

SEQ ID NO: 654 - DNA, 26 bp, Artificial Sequence
  Synthetic
tgcctggctgggtgtgcatgtgttgg

SEQ ID NO: 655 - DNA, 26 bp, Artificial Sequence
  Synthetic
acccaacacatgcacacccagccagg

SEQ ID NO: 656 - DNA, 26 bp, Artificial Sequence
  Synthetic
tgggtgtgcatgtgttgggttattgg

SEQ ID NO: 657 - DNA, 26 bp, Artificial Sequence
  Synthetic
tgtgcatgtgttgggttattggttgg

SEQ ID NO: 658 - DNA, 26 bp, Artificial Sequence
  Synthetic
gagtgtgtacatctagctatgtgtgg

SEQ ID NO: 659 - DNA, 26 bp, Artificial Sequence
  Synthetic
gtgtacatctagctatgtgtggctgg

SEQ ID NO: 660 - DNA, 26 bp, Artificial Sequence
  Synthetic
catctagctatgtgtggctggtgtgg

SEQ ID NO: 661 - DNA, 26 bp, Artificial Sequence
  Synthetic
atctagctatgtgtggctggtgtggg

SEQ ID NO: 662 - DNA, 26 bp, Artificial Sequence
  Synthetic
tggctggtgtgggtctgaatgtctgg

SEQ ID NO: 663 - DNA, 26 bp, Artificial Sequence
  Synthetic
gtctggtagagagtgtttgtgtgtgg

SEQ ID NO: 664 - DNA, 26 bp, Artificial Sequence
  Synthetic
gtgtggttgtgtgtctgatgtgtggg

SEQ ID NO: 665 - DNA, 26 bp, Artificial Sequence
  Synthetic
gggcagctggtttggtatgtgtctgg

SEQ ID NO: 666 - DNA, 26 bp, Artificial Sequence
  Synthetic
ggcagctggtttggtatgtgtctggg

SEQ ID NO: 667 - DNA, 26 bp, Artificial Sequence
  Synthetic
ggtttggtatgtgtctgggcatctgg

SEQ ID NO: 668 - DNA, 26 bp, Artificial Sequence
  Synthetic
tggtatgtgtctgggcatctggttgg

SEQ ID NO: 669 - DNA, 26 bp, Artificial Sequence
  Synthetic
tgggcatctggttggtgaacatgtgg

SEQ ID NO: 670 - DNA, 26 bp, Artificial Sequence
  Synthetic
tggttggtgaacatgtggatgtctgg

SEQ ID NO: 671 - DNA, 26 bp, Artificial Sequence
  Synthetic
ggttggtgaacatgtggatgtctggg

SEQ ID NO: 672 - DNA, 26 bp, Artificial Sequence
  Synthetic
gaacatgtggatgtctgggctgttgg

SEQ ID NO: 673 - DNA, 26 bp, Artificial Sequence
  Synthetic
aacatgtggatgtctgggctgttggg

SEQ ID NO: 674 - DNA, 26 bp, Artificial Sequence
  Synthetic
tgtggatgtctgggctgttgggctgg

SEQ ID NO: 675 - DNA, 26 bp, Artificial Sequence
  Synthetic
gtggatgtctgggctgttgggctggg

SEQ ID NO: 676 - DNA, 26 bp, Artificial Sequence
  Synthetic
ggggtatatgtctggatggctggagg

SEQ ID NO: 677 - DNA, 26 bp, Artificial Sequence
  Synthetic
ctggatggctggaggagtggaagagg

SEQ ID NO: 678 - DNA, 26 bp, Artificial Sequence
  Synthetic
atggtgtctccagcctcccattgtgg

SEQ ID NO: 679 - DNA, 26 bp, Artificial Sequence
  Synthetic
ctccagcctcccattgtggtttcagg

SEQ ID NO: 680 - DNA, 26 bp, Artificial Sequence
  Synthetic
agcctgaaaccacaatgggaggctgg

SEQ ID NO: 681 - DNA, 26 bp, Artificial Sequence
  Synthetic
aagaagcctgaaaccacaatgggagg

SEQ ID NO: 682 - DNA, 26 bp, Artificial Sequence
  Synthetic
tcccattgtggtttcaggcttcttgg

SEQ ID NO: 683 - DNA, 26 bp, Artificial Sequence
  Synthetic
gccaagaagcctgaaaccacaatggg

SEQ ID NO: 684 - DNA, 26 bp, Artificial Sequence
  Synthetic
agccaagaagcctgaaaccacaatgg

SEQ ID NO: 685 - DNA, 26 bp, Artificial Sequence
  Synthetic
caacaagctatacaggtctgtcctgg

SEQ ID NO: 686 - DNA, 26 bp, Artificial Sequence
  Synthetic
aggacagacctgtatagcttgttggg

SEQ ID NO: 687 - DNA, 26 bp, Artificial Sequence
  Synthetic
caggacagacctgtatagcttgttgg

SEQ ID NO: 688 - DNA, 26 bp, Artificial Sequence
  Synthetic
gtgacatgactgagaaggtgcccagg

SEQ ID NO: 689 - DNA, 26 bp, Artificial Sequence
  Synthetic
cgaggttgtcactggcagagagaggg

SEQ ID NO: 690 - DNA, 26 bp, Artificial Sequence
  Synthetic
tcgaggttgtcactggcagagagagg

SEQ ID NO: 691 - DNA, 26 bp, Artificial Sequence
  Synthetic
gccagtgacaacctcgagacctcagg

SEQ ID NO: 692 - DNA, 26 bp, Artificial Sequence
  Synthetic
acctgaggtctcgaggttgtcactgg

SEQ ID NO: 693 - DNA, 26 bp, Artificial Sequence
  Synthetic
aaaggtggacacctgaggtctcgagg

SEQ ID NO: 694 - DNA, 26 bp, Artificial Sequence
  Synthetic
ctcaggtgtccacctttatgtcccgg

SEQ ID NO: 695 - DNA, 26 bp, Artificial Sequence
  Synthetic
tcaggtgtccacctttatgtcccggg

SEQ ID NO: 696 - DNA, 26 bp, Artificial Sequence
  Synthetic
cgggacataaaggtggacacctgagg

SEQ ID NO: 697 - DNA, 26 bp, Artificial Sequence
  Synthetic
gaatttgtttgctgagcctgtgaggg

SEQ ID NO: 698 - DNA, 26 bp, Artificial Sequence
  Synthetic
tgaatttgtttgctgagcctgtgagg

SEQ ID NO: 699 - DNA, 26 bp, Artificial Sequence
  Synthetic
aaaatttcccagggaatttctccagg

SEQ ID NO: 700 - DNA, 26 bp, Artificial Sequence
  Synthetic
ggcaagacctggagaaattccctggg

SEQ ID NO: 701 - DNA, 26 bp, Artificial Sequence
  Synthetic
gggcaagacctggagaaattccctgg

SEQ ID NO: 702 - DNA, 26 bp, Artificial Sequence
  Synthetic
agagctcagcacagggcaagacctgg

SEQ ID NO: 703 - DNA, 26 bp, Artificial Sequence
  Synthetic
aggtcttgccctgtgctgagctctgg

SEQ ID NO: 704 - DNA, 26 bp, Artificial Sequence
  Synthetic
ggtcttgccctgtgctgagctctggg

SEQ ID NO: 705 - DNA, 26 bp, Artificial Sequence
  Synthetic
agatgcccacagaactggtgacttgg

SEQ ID NO: 706 - DNA, 26 bp, Artificial Sequence
  Synthetic
aagtcaccagttctgtgggcatctgg

SEQ ID NO: 707 - DNA, 26 bp, Artificial Sequence
  Synthetic
ggcaggagggtggctggtctgtctgg

SEQ ID NO: 708 - DNA, 26 bp, Artificial Sequence
  Synthetic
gagggtggctggtctgtctggagagg

SEQ ID NO: 709 - DNA, 26 bp, Artificial Sequence
  Synthetic
ggtctgtctggagaggatcatgttgg

SEQ ID NO: 710 - DNA, 26 bp, Artificial Sequence
  Synthetic
ttcagctcactcaccacccgtctggg

SEQ ID NO: 711 - DNA, 26 bp, Artificial Sequence
  Synthetic
gttcagctcactcaccacccgtctgg

SEQ ID NO: 712 - DNA, 26 bp, Artificial Sequence
  Synthetic
ggtggtgagtgagctgaacctcatgg

SEQ ID NO: 713 - DNA, 26 bp, Artificial Sequence
  Synthetic
gagctgaacctcatggcacctgtagg

SEQ ID NO: 714 - DNA, 26 bp, Artificial Sequence
  Synthetic
ggagaaacgagaaaggcagtaccagg

SEQ ID NO: 715 - DNA, 26 bp, Artificial Sequence
  Synthetic
gagaaacgagaaaggcagtaccaggg

SEQ ID NO: 716 - DNA, 26 bp, Artificial Sequence
  Synthetic
aaacgagaaaggcagtaccagggagg

SEQ ID NO: 717 - DNA, 26 bp, Artificial Sequence
  Synthetic
aacgagaaaggcagtaccagggaggg

SEQ ID NO: 718 - DNA, 26 bp, Artificial Sequence
  Synthetic
tctacagaaacactgcctcatctggg

SEQ ID NO: 719 - DNA, 26 bp, Artificial Sequence
  Synthetic
ttctacagaaacactgcctcatctgg

SEQ ID NO: 720 - DNA, 26 bp, Artificial Sequence
  Synthetic
aaaataatattcctaggacccattgg

SEQ ID NO: 721 - DNA, 26 bp, Artificial Sequence
  Synthetic
aaataatattcctaggacccattggg

SEQ ID NO: 722 - DNA, 26 bp, Artificial Sequence
  Synthetic
attcctaggacccattgggtaaatgg

SEQ ID NO: 723 - DNA, 26 bp, Artificial Sequence
  Synthetic
ggtccatttacccaatgggtcctagg

SEQ ID NO: 724 - DNA, 26 bp, Artificial Sequence
  Synthetic
agcagctggtccatttacccaatggg

SEQ ID NO: 725 - DNA, 26 bp, Artificial Sequence
  Synthetic
gagcagctggtccatttacccaatgg

SEQ ID NO: 726 - DNA, 26 bp, Artificial Sequence
  Synthetic
tgggtaaatggaccagctgctcatgg

SEQ ID NO: 727 - DNA, 26 bp, Artificial Sequence
  Synthetic
taaatggaccagctgctcatggctgg

SEQ ID NO: 728 - DNA, 26 bp, Artificial Sequence
  Synthetic
cactaattagaagttgtctagcatgg

SEQ ID NO: 729 - DNA, 26 bp, Artificial Sequence
  Synthetic
gctaagagtgtggcttctgttgttgg

SEQ ID NO: 730 - DNA, 26 bp, Artificial Sequence
  Synthetic
ctaagagtgtggcttctgttgttggg

SEQ ID NO: 731 - DNA, 26 bp, Artificial Sequence
  Synthetic
gagtgtggcttctgttgttgggctgg

SEQ ID NO: 732 - DNA, 26 bp, Artificial Sequence
  Synthetic
gtgtaagtgtttgctgggtttggtgg

SEQ ID NO: 733 - DNA, 26 bp, Artificial Sequence
  Synthetic
taagtgtaagtgtttgctgggtttgg

SEQ ID NO: 734 - DNA, 26 bp, Artificial Sequence
  Synthetic
tcatttaagtgtaagtgtttgctggg

SEQ ID NO: 735 - DNA, 26 bp, Artificial Sequence
  Synthetic
gtcatttaagtgtaagtgtttgctgg

SEQ ID NO: 736 - DNA, 26 bp, Artificial Sequence
  Synthetic
taataaatgtttacagtggtgcctgg

SEQ ID NO: 737 - DNA, 22 bp, Artificial Sequence
  Synthetic
ccuacuaugagccaucuacuuu

SEQ ID NO: 738 - DNA, 22 bp, Artificial Sequence
  Synthetic
cuacuaugagccaucuacuuuc

SEQ ID NO: 739 - DNA, 22 bp, Artificial Sequence
  Synthetic
cugugaagugcccagaaaguag

SEQ ID NO: 740 - DNA, 22 bp, Artificial Sequence
  Synthetic
cauaggguucacagaggauuaa

SEQ ID NO: 741 - DNA, 22 bp, Artificial Sequence
  Synthetic
uuaauccucugugaacccuaug

SEQ ID NO: 742 - DNA, 22 bp, Artificial Sequence
  Synthetic
uaauccucugugaacccuauga

SEQ ID NO: 743 - DNA, 22 bp, Artificial Sequence
  Synthetic
ccagggucccacagcuagaagu

SEQ ID NO: 744 - DNA, 22 bp, Artificial Sequence
  Synthetic
acucuucuggccaucguacuca

SEQ ID NO: 745 - DNA, 22 bp, Artificial Sequence
  Synthetic
gcugauuugugcucucacucuu

SEQ ID NO: 746 - DNA, 22 bp, Artificial Sequence
  Synthetic
ggcaguagccaccagcacacug

SEQ ID NO: 747 - DNA, 22 bp, Artificial Sequence
  Synthetic
acaggcaguagccaccagcaca

SEQ ID NO: 748 - DNA, 22 bp, Artificial Sequence
  Synthetic
ccucgcuucccugggcuccaga

SEQ ID NO: 749 - DNA, 22 bp, Artificial Sequence
  Synthetic
ccagucuggagcccagggaagc

SEQ ID NO: 750 - DNA, 22 bp, Artificial Sequence
  Synthetic
ggagauguccagucuggagccc

SEQ ID NO: 751 - DNA, 22 bp, Artificial Sequence
  Synthetic
uggagauguccagucuggagcc

SEQ ID NO: 752 - DNA, 22 bp, Artificial Sequence
  Synthetic
aagauuguuggagauguccagu

SEQ ID NO: 753 - DNA, 22 bp, Artificial Sequence
  Synthetic
gacaucuccaacaaucuuucac

SEQ ID NO: 754 - DNA, 22 bp, Artificial Sequence
  Synthetic
caacaaucuuucacauggcagu

SEQ ID NO: 755 - DNA, 22 bp, Artificial Sequence
  Synthetic
cuaacugccaugugaaagauug

SEQ ID NO: 756 - DNA, 22 bp, Artificial Sequence
  Synthetic
ggucauaacaaggcuucuggac

SEQ ID NO: 757 - DNA, 22 bp, Artificial Sequence
  Synthetic
cagaagccuuguuaugaccugc

SEQ ID NO: 758 - DNA, 22 bp, Artificial Sequence
  Synthetic
cuugcaggucauaacaaggcuu

SEQ ID NO: 759 - DNA, 22 bp, Artificial Sequence
  Synthetic
ucauggccuugcaggucauaac

SEQ ID NO: 760 - DNA, 22 bp, Artificial Sequence
  Synthetic
ggucagguuaaucauggccuug

SEQ ID NO: 761 - DNA, 22 bp, Artificial Sequence
  Synthetic
caugauuaaccugacccugcag

SEQ ID NO: 762 - DNA, 22 bp, Artificial Sequence
  Synthetic
cagcugcagggucagguuaauc

SEQ ID NO: 763 - DNA, 22 bp, Artificial Sequence
  Synthetic
gcccuuccucagugcucacagc

SEQ ID NO: 764 - DNA, 22 bp, Artificial Sequence
  Synthetic
gccgggcugugagcacugagga

SEQ ID NO: 765 - DNA, 22 bp, Artificial Sequence
  Synthetic
acguggccgggcugugagcacu

SEQ ID NO: 766 - DNA, 22 bp, Artificial Sequence
  Synthetic
ucagugcucacagcccggccac

SEQ ID NO: 767 - DNA, 22 bp, Artificial Sequence
  Synthetic
cacagcccggccacguggccug

SEQ ID NO: 768 - DNA, 22 bp, Artificial Sequence
  Synthetic
cauuaccugcaggccacguggc

SEQ ID NO: 769 - DNA, 22 bp, Artificial Sequence
  Synthetic
acauuaccugcaggccacgugg

SEQ ID NO: 770 - DNA, 22 bp, Artificial Sequence
  Synthetic
cugaacauuaccugcaggccac

SEQ ID NO: 771 - DNA, 22 bp, Artificial Sequence
  Synthetic
ucgguguucugaacauuaccug

SEQ ID NO: 772 - DNA, 22 bp, Artificial Sequence
  Synthetic
gcacagcaagcaccaagagcaa

SEQ ID NO: 773 - DNA, 22 bp, Artificial Sequence
  Synthetic
ggcacagcaagcaccaagagca

SEQ ID NO: 774 - DNA, 22 bp, Artificial Sequence
  Synthetic
uugcucuuggugcuugcugugc

SEQ ID NO: 775 - DNA, 22 bp, Artificial Sequence
  Synthetic
ugcugugccuggaguguuguuc

SEQ ID NO: 776 - DNA, 22 bp, Artificial Sequence
  Synthetic
gcugugccuggaguguuguucc

SEQ ID NO: 777 - DNA, 22 bp, Artificial Sequence
  Synthetic
uggacgaguagguggucuuuag

SEQ ID NO: 778 - DNA, 22 bp, Artificial Sequence
  Synthetic
ccuaaagaccaccuacucgucc

SEQ ID NO: 779 - DNA, 22 bp, Artificial Sequence
  Synthetic
ccuuggacgaguagguggucuu

SEQ ID NO: 780 - DNA, 22 bp, Artificial Sequence
  Synthetic
agaccaccuacucguccaaggu

SEQ ID NO: 781 - DNA, 22 bp, Artificial Sequence
  Synthetic
gaccaccuacucguccaaggug

SEQ ID NO: 782 - DNA, 22 bp, Artificial Sequence
  Synthetic
ugcccucaccuuggacgaguag

SEQ ID NO: 783 - DNA, 22 bp, Artificial Sequence
  Synthetic
aauugcccucaccuuggacgag

SEQ ID NO: 784 - DNA, 22 bp, Artificial Sequence
  Synthetic
cuuucaacacagccugacagag

SEQ ID NO: 785 - DNA, 22 bp, Artificial Sequence
  Synthetic
auuaauagaacccaacaucugu

SEQ ID NO: 786 - DNA, 22 bp, Artificial Sequence
  Synthetic
agaacccaacaucuguuaggcu

SEQ ID NO: 787 - DNA, 22 bp, Artificial Sequence
  Synthetic
aacuccacagccuaacagaugu

SEQ ID NO: 788 - DNA, 22 bp, Artificial Sequence
  Synthetic
aguugaauacccauuaucucau

SEQ ID NO: 789 - DNA, 22 bp, Artificial Sequence
  Synthetic
uaguuagggaggguguaaaucu

SEQ ID NO: 790 - DNA, 22 bp, Artificial Sequence
  Synthetic
aguuagggaggguguaaaucug

SEQ ID NO: 791 - DNA, 22 bp, Artificial Sequence
  Synthetic
gacuuagcauguuaaaugcugc

SEQ ID NO: 792 - DNA, 22 bp, Artificial Sequence
  Synthetic
aaagagcuagcagcaacgcaca

SEQ ID NO: 793 - DNA, 22 bp, Artificial Sequence
  Synthetic
aagagcuagcagcaacgcacag

SEQ ID NO: 794 - DNA, 22 bp, Artificial Sequence
  Synthetic
gggggaagucaagguaggaaug

SEQ ID NO: 795 - DNA, 22 bp, Artificial Sequence
  Synthetic
ggggaagucaagguaggaaugg

SEQ ID NO: 796 - DNA, 22 bp, Artificial Sequence
  Synthetic
cucuucagugaagaaaugaugg

SEQ ID NO: 797 - DNA, 22 bp, Artificial Sequence
  Synthetic
guaucucuucagugaagaaaug

SEQ ID NO: 798 - DNA, 22 bp, Artificial Sequence
  Synthetic
aaaaugagguaugugguaacgg

SEQ ID NO: 799 - DNA, 22 bp, Artificial Sequence
  Synthetic
aaaugagguaugugguaacgga

SEQ ID NO: 800 - DNA, 22 bp, Artificial Sequence
  Synthetic
gugguaacggaaggguguaacc

SEQ ID NO: 801 - DNA, 22 bp, Artificial Sequence
  Synthetic
acgaggccuagagugcugugcc

SEQ ID NO: 802 - DNA, 22 bp, Artificial Sequence
  Synthetic
cgaggccuagagugcugugccg

SEQ ID NO: 803 - DNA, 22 bp, Artificial Sequence
  Synthetic
cuagagugcugugccgugggau

SEQ ID NO: 804 - DNA, 22 bp, Artificial Sequence
  Synthetic
cacaucccacggcacagcacuc

SEQ ID NO: 805 - DNA, 22 bp, Artificial Sequence
  Synthetic
gugcugugccgugggauguggu

SEQ ID NO: 806 - DNA, 22 bp, Artificial Sequence
  Synthetic
ugcugugccgugggauguggug

SEQ ID NO: 807 - DNA, 22 bp, Artificial Sequence
  Synthetic
cuugucacccgcaccacauccc

SEQ ID NO: 808 - DNA, 22 bp, Artificial Sequence
  Synthetic
ugggauguggugcgggugacaa

SEQ ID NO: 809 - DNA, 22 bp, Artificial Sequence
  Synthetic
uguggugcgggugacaaguggc

SEQ ID NO: 810 - DNA, 22 bp, Artificial Sequence
  Synthetic
guggugcgggugacaaguggcc

SEQ ID NO: 811 - DNA, 22 bp, Artificial Sequence
  Synthetic
acucagucugggagcccggagg

SEQ ID NO: 812 - DNA, 22 bp, Artificial Sequence
  Synthetic
cucagucugggagcccggaggu

SEQ ID NO: 813 - DNA, 22 bp, Artificial Sequence
  Synthetic
ccugaggugcuguucccaugcu

SEQ ID NO: 814 - DNA, 22 bp, Artificial Sequence
  Synthetic
ccaaagcaugggaacagcaccu

SEQ ID NO: 815 - DNA, 22 bp, Artificial Sequence
  Synthetic
gacacucaggaacuccaaagca

SEQ ID NO: 816 - DNA, 22 bp, Artificial Sequence
  Synthetic
ggacacucaggaacuccaaagc

SEQ ID NO: 817 - DNA, 22 bp, Artificial Sequence
  Synthetic
cucagacagagaagcugcccau

SEQ ID NO: 818 - DNA, 22 bp, Artificial Sequence
  Synthetic
acucagacagagaagcugccca

SEQ ID NO: 819 - DNA, 22 bp, Artificial Sequence
  Synthetic
gaguauguguauuaauauuaau

SEQ ID NO: 820 - DNA, 22 bp, Artificial Sequence
  Synthetic
acuuccuccucaucaaccaggg

SEQ ID NO: 821 - DNA, 22 bp, Artificial Sequence
  Synthetic
gacuuccuccucaucaaccagg

SEQ ID NO: 822 - DNA, 22 bp, Artificial Sequence
  Synthetic
cccugguugaugaggaggaagu

SEQ ID NO: 823 - DNA, 22 bp, Artificial Sequence
  Synthetic
ccugguugaugaggaggaaguc

SEQ ID NO: 824 - DNA, 22 bp, Artificial Sequence
  Synthetic
ccagacuuccuccucaucaacc

SEQ ID NO: 825 - DNA, 22 bp, Artificial Sequence
  Synthetic
cccagacuuccuccucaucaac

SEQ ID NO: 826 - DNA, 22 bp, Artificial Sequence
  Synthetic
augaggaggaagucugggcuaa

SEQ ID NO: 827 - DNA, 22 bp, Artificial Sequence
  Synthetic
aagucugggcuaauggguugca

SEQ ID NO: 828 - DNA, 22 bp, Artificial Sequence
  Synthetic
uauacccaccaccgcacacaga

SEQ ID NO: 829 - DNA, 22 bp, Artificial Sequence
  Synthetic
cuauacccaccaccgcacacag

SEQ ID NO: 830 - DNA, 22 bp, Artificial Sequence
  Synthetic
gguggguauagcuuccuuuacu

SEQ ID NO: 831 - DNA, 22 bp, Artificial Sequence
  Synthetic
gccugcuuucuugugccuccug

SEQ ID NO: 832 - DNA, 22 bp, Artificial Sequence
  Synthetic
ccugcuggcauuucauuguguu

SEQ ID NO: 833 - DNA, 22 bp, Artificial Sequence
  Synthetic
ccacaacacaaugaaaugccag

SEQ ID NO: 834 - DNA, 22 bp, Artificial Sequence
  Synthetic
cuggcauuucauuguguugugg

SEQ ID NO: 835 - DNA, 22 bp, Artificial Sequence
  Synthetic
ugugguugguugugugucuggu

SEQ ID NO: 836 - DNA, 22 bp, Artificial Sequence
  Synthetic
guugugugucuggucuggcugu

SEQ ID NO: 837 - DNA, 22 bp, Artificial Sequence
  Synthetic
gucuggcugugugguuaugugc

SEQ ID NO: 838 - DNA, 22 bp, Artificial Sequence
  Synthetic
ggcugugugguuaugugccugg

SEQ ID NO: 839 - DNA, 22 bp, Artificial Sequence
  Synthetic
gcugugugguuaugugccuggc

SEQ ID NO: 840 - DNA, 22 bp, Artificial Sequence
  Synthetic
ugccuggcugggugugcaugug

SEQ ID NO: 841 - DNA, 22 bp, Artificial Sequence
  Synthetic
acccaacacaugcacacccagc

SEQ ID NO: 842 - DNA, 22 bp, Artificial Sequence
  Synthetic
ugggugugcauguguuggguua

SEQ ID NO: 843 - DNA, 22 bp, Artificial Sequence
  Synthetic
ugugcauguguuggguuauugg

SEQ ID NO: 844 - DNA, 22 bp, Artificial Sequence
  Synthetic
gaguguguacaucuagcuaugu

SEQ ID NO: 845 - DNA, 22 bp, Artificial Sequence
  Synthetic
guguacaucuagcuaugugugg

SEQ ID NO: 846 - DNA, 22 bp, Artificial Sequence
  Synthetic
caucuagcuauguguggcuggu

SEQ ID NO: 847 - DNA, 22 bp, Artificial Sequence
  Synthetic
aucuagcuauguguggcuggug

SEQ ID NO: 848 - DNA, 22 bp, Artificial Sequence
  Synthetic
uggcuggugugggucugaaugu

SEQ ID NO: 849 - DNA, 22 bp, Artificial Sequence
  Synthetic
gucugguagagaguguuugugu

SEQ ID NO: 850 - DNA, 22 bp, Artificial Sequence
  Synthetic
gugugguugugugucugaugug

SEQ ID NO: 851 - DNA, 22 bp, Artificial Sequence
  Synthetic
gggcagcugguuugguaugugu

SEQ ID NO: 852 - DNA, 22 bp, Artificial Sequence
  Synthetic
ggcagcugguuugguauguguc

SEQ ID NO: 853 - DNA, 22 bp, Artificial Sequence
  Synthetic
gguuugguaugugucugggcau

SEQ ID NO: 854 - DNA, 22 bp, Artificial Sequence
  Synthetic
ugguaugugucugggcaucugg

SEQ ID NO: 855 - DNA, 22 bp, Artificial Sequence
  Synthetic
ugggcaucugguuggugaacau

SEQ ID NO: 856 - DNA, 22 bp, Artificial Sequence
  Synthetic
ugguuggugaacauguggaugu

SEQ ID NO: 857 - DNA, 22 bp, Artificial Sequence
  Synthetic
gguuggugaacauguggauguc

SEQ ID NO: 858 - DNA, 22 bp, Artificial Sequence
  Synthetic
gaacauguggaugucugggcug

SEQ ID NO: 859 - DNA, 22 bp, Artificial Sequence
  Synthetic
aacauguggaugucugggcugu

SEQ ID NO: 860 - DNA, 22 bp, Artificial Sequence
  Synthetic
uguggaugucugggcuguuggg

SEQ ID NO: 861 - DNA, 22 bp, Artificial Sequence
  Synthetic
guggaugucugggcuguugggc

SEQ ID NO: 862 - DNA, 22 bp, Artificial Sequence
  Synthetic
gggguauaugucuggauggcug

SEQ ID NO: 863 - DNA, 22 bp, Artificial Sequence
  Synthetic
cuggauggcuggaggaguggaa

SEQ ID NO: 864 - DNA, 22 bp, Artificial Sequence
  Synthetic
auggugucuccagccucccauu

SEQ ID NO: 865 - DNA, 22 bp, Artificial Sequence
  Synthetic
cuccagccucccauugugguuu

SEQ ID NO: 866 - DNA, 22 bp, Artificial Sequence
  Synthetic
agccugaaaccacaaugggagg

SEQ ID NO: 867 - DNA, 22 bp, Artificial Sequence
  Synthetic
aagaagccugaaaccacaaugg

SEQ ID NO: 868 - DNA, 22 bp, Artificial Sequence
  Synthetic
ucccauugugguuucaggcuuc

SEQ ID NO: 869 - DNA, 22 bp, Artificial Sequence
  Synthetic
gccaagaagccugaaaccacaa

SEQ ID NO: 870 - DNA, 22 bp, Artificial Sequence
  Synthetic
agccaagaagccugaaaccaca

SEQ ID NO: 871 - DNA, 22 bp, Artificial Sequence
  Synthetic
caacaagcuauacaggucuguc

SEQ ID NO: 872 - DNA, 22 bp, Artificial Sequence
  Synthetic
aggacagaccuguauagcuugu

SEQ ID NO: 873 - DNA, 22 bp, Artificial Sequence
  Synthetic
caggacagaccuguauagcuug

SEQ ID NO: 874 - DNA, 22 bp, Artificial Sequence
  Synthetic
gugacaugacugagaaggugcc

SEQ ID NO: 875 - DNA, 22 bp, Artificial Sequence
  Synthetic
cgagguugucacuggcagagag

SEQ ID NO: 876 - DNA, 22 bp, Artificial Sequence
  Synthetic
ucgagguugucacuggcagaga

SEQ ID NO: 877 - DNA, 22 bp, Artificial Sequence
  Synthetic
gccagugacaaccucgagaccu

SEQ ID NO: 878 - DNA, 22 bp, Artificial Sequence
  Synthetic
accugaggucucgagguuguca

SEQ ID NO: 879 - DNA, 22 bp, Artificial Sequence
  Synthetic
aaagguggacaccugaggucuc

SEQ ID NO: 880 - DNA, 22 bp, Artificial Sequence
  Synthetic
cucagguguccaccuuuauguc

SEQ ID NO: 881 - DNA, 22 bp, Artificial Sequence
  Synthetic
ucagguguccaccuuuaugucc

SEQ ID NO: 882 - DNA, 22 bp, Artificial Sequence
  Synthetic
cgggacauaaagguggacaccu

SEQ ID NO: 883 - DNA, 22 bp, Artificial Sequence
  Synthetic
gaauuuguuugcugagccugug

SEQ ID NO: 884 - DNA, 22 bp, Artificial Sequence
  Synthetic
ugaauuuguuugcugagccugu

SEQ ID NO: 885 - DNA, 22 bp, Artificial Sequence
  Synthetic
aaaauuucccagggaauuucuc

SEQ ID NO: 886 - DNA, 22 bp, Artificial Sequence
  Synthetic
ggcaagaccuggagaaauuccc

SEQ ID NO: 887 - DNA, 22 bp, Artificial Sequence
  Synthetic
gggcaagaccuggagaaauucc

SEQ ID NO: 888 - DNA, 22 bp, Artificial Sequence
  Synthetic
agagcucagcacagggcaagac

SEQ ID NO: 889 - DNA, 22 bp, Artificial Sequence
  Synthetic
aggucuugcccugugcugagcu

SEQ ID NO: 890 - DNA, 22 bp, Artificial Sequence
  Synthetic
ggucuugcccugugcugagcuc

SEQ ID NO: 891 - DNA, 22 bp, Artificial Sequence
  Synthetic
agaugcccacagaacuggugac

SEQ ID NO: 892 - DNA, 22 bp, Artificial Sequence
  Synthetic
aagucaccaguucugugggcau

SEQ ID NO: 893 - DNA, 22 bp, Artificial Sequence
  Synthetic
ggcaggaggguggcuggucugu

SEQ ID NO: 894 - DNA, 22 bp, Artificial Sequence
  Synthetic
gaggguggcuggucugucugga

SEQ ID NO: 895 - DNA, 22 bp, Artificial Sequence
  Synthetic
ggucugucuggagaggaucaug

SEQ ID NO: 896 - DNA, 22 bp, Artificial Sequence
  Synthetic
uucagcucacucaccacccguc

SEQ ID NO: 897 - DNA, 22 bp, Artificial Sequence
  Synthetic
guucagcucacucaccacccgu

SEQ ID NO: 898 - DNA, 22 bp, Artificial Sequence
  Synthetic
gguggugagugagcugaaccuc

SEQ ID NO: 899 - DNA, 22 bp, Artificial Sequence
  Synthetic
gagcugaaccucauggcaccug

SEQ ID NO: 900 - DNA, 22 bp, Artificial Sequence
  Synthetic
ggagaaacgagaaaggcaguac

SEQ ID NO: 901 - DNA, 22 bp, Artificial Sequence
  Synthetic
gagaaacgagaaaggcaguacc

SEQ ID NO: 902 - DNA, 22 bp, Artificial Sequence
  Synthetic
aaacgagaaaggcaguaccagg

SEQ ID NO: 903 - DNA, 22 bp, Artificial Sequence
  Synthetic
aacgagaaaggcaguaccaggg

SEQ ID NO: 904 - DNA, 22 bp, Artificial Sequence
  Synthetic
ucuacagaaacacugccucauc

SEQ ID NO: 905 - DNA, 22 bp, Artificial Sequence
  Synthetic
uucuacagaaacacugccucau

SEQ ID NO: 906 - DNA, 22 bp, Artificial Sequence
  Synthetic
aaaauaauauuccuaggaccca

SEQ ID NO: 907 - DNA, 22 bp, Artificial Sequence
  Synthetic
aaauaauauuccuaggacccau

SEQ ID NO: 908 - DNA, 22 bp, Artificial Sequence
  Synthetic
auuccuaggacccauuggguaa

SEQ ID NO: 909 - DNA, 22 bp, Artificial Sequence
  Synthetic
gguccauuuacccaaugggucc

SEQ ID NO: 910 - DNA, 22 bp, Artificial Sequence
  Synthetic
agcagcugguccauuuacccaa

SEQ ID NO: 911 - DNA, 22 bp, Artificial Sequence
  Synthetic
gagcagcugguccauuuaccca

SEQ ID NO: 912 - DNA, 22 bp, Artificial Sequence
  Synthetic
uggguaaauggaccagcugcuc

SEQ ID NO: 913 - DNA, 22 bp, Artificial Sequence
  Synthetic
uaaauggaccagcugcucaugg

SEQ ID NO: 914 - DNA, 22 bp, Artificial Sequence
  Synthetic
cacuaauuagaaguugucuagc

SEQ ID NO: 915 - DNA, 22 bp, Artificial Sequence
  Synthetic
gcuaagaguguggcuucuguug

SEQ ID NO: 916 - DNA, 22 bp, Artificial Sequence
  Synthetic
cuaagaguguggcuucuguugu

SEQ ID NO: 917 - DNA, 22 bp, Artificial Sequence
  Synthetic
gaguguggcuucuguuguuggg

SEQ ID NO: 918 - DNA, 22 bp, Artificial Sequence
  Synthetic
guguaaguguuugcuggguuug

SEQ ID NO: 919 - DNA, 22 bp, Artificial Sequence
  Synthetic
uaaguguaaguguuugcugggu

SEQ ID NO: 920 - DNA, 22 bp, Artificial Sequence
  Synthetic
ucauuuaaguguaaguguuugc

SEQ ID NO: 921 - DNA, 22 bp, Artificial Sequence
  Synthetic
gucauuuaaguguaaguguuug

SEQ ID NO: 922 - DNA, 22 bp, Artificial Sequence
  Synthetic
uaauaaauguuuacaguggugc

SEQ ID NO: 923 - DNA, 27 bp, Artificial Sequence
  Synthetic
tcatcacttgttcttggcttagaggat

SEQ ID NO: 924 - DNA, 27 bp, Artificial Sequence
  Synthetic
aggatggtgctccacaaattctgggat

SEQ ID NO: 925 - DNA, 27 bp, Artificial Sequence
  Synthetic
cacagccacactttatcatcccagaat

SEQ ID NO: 926 - DNA, 27 bp, Artificial Sequence
  Synthetic
gtgaggggccaaggcactgtgctgggt

SEQ ID NO: 927 - DNA, 27 bp, Artificial Sequence
  Synthetic
ctcgtggagctcacattctggagggat

SEQ ID NO: 928 - DNA, 27 bp, Artificial Sequence
  Synthetic
ctcacattctggagggatttgttgaat

SEQ ID NO: 929 - DNA, 27 bp, Artificial Sequence
  Synthetic
gacctctaaatatttaatgtctggagt

SEQ ID NO: 930 - DNA, 27 bp, Artificial Sequence
  Synthetic
gggaattctagaccacatttactgagt

SEQ ID NO: 931 - DNA, 27 bp, Artificial Sequence
  Synthetic
aggtactcagtaaatgtggtctagaat

SEQ ID NO: 932 - DNA, 27 bp, Artificial Sequence
  Synthetic
ttctgttgatgccaagccccagtgagt

SEQ ID NO: 933 - DNA, 27 bp, Artificial Sequence
  Synthetic
cccagtgagtacgatggccagaagagt

SEQ ID NO: 934 - DNA, 27 bp, Artificial Sequence
  Synthetic
tcatggcctttccccttctcaccgggt

SEQ ID NO: 935 - DNA, 27 bp, Artificial Sequence
  Synthetic
aggcttctggacttggcacaagtgagt

SEQ ID NO: 936 - DNA, 27 bp, Artificial Sequence
  Synthetic
ctgcaggtaatgttcagaacaccgagt

SEQ ID NO: 937 - DNA, 27 bp, Artificial Sequence
  Synthetic
ctgtgcctggagtgttgttcctggggt

SEQ ID NO: 938 - DNA, 27 bp, Artificial Sequence
  Synthetic
agctctttcaacacagcctgacagagt

SEQ ID NO: 939 - DNA, 27 bp, Artificial Sequence
  Synthetic
aacccaacatctgttaggctgtggagt

SEQ ID NO: 940 - DNA, 27 bp, Artificial Sequence
  Synthetic
aacatctgttaggctgtggagttgaat

SEQ ID NO: 941 - DNA, 27 bp, Artificial Sequence
  Synthetic
gcccactttccaaatgagataatgggt

SEQ ID NO: 942 - DNA, 27 bp, Artificial Sequence
  Synthetic
cctggagtcccagctatactcgggagt

SEQ ID NO: 943 - DNA, 27 bp, Artificial Sequence
  Synthetic
acttgttgaaggctgatcattatgggt

SEQ ID NO: 944 - DNA, 27 bp, Artificial Sequence
  Synthetic
agtaagtttagagttgagcgtgtgggt

SEQ ID NO: 945 - DNA, 27 bp, Artificial Sequence
  Synthetic
agcagaaacagccagagctcttgggat

SEQ ID NO: 946 - DNA, 27 bp, Artificial Sequence
  Synthetic
agaggtccagtgctcagatttgtggat

SEQ ID NO: 947 - DNA, 27 bp, Artificial Sequence
  Synthetic
atccaagtcacccataaacctatggat

SEQ ID NO: 948 - DNA, 27 bp, Artificial Sequence
  Synthetic
atccataggtttatgggtgacttggat

SEQ ID NO: 949 - DNA, 27 bp, Artificial Sequence
  Synthetic
ccttaacagacagacacataaccgagt

SEQ ID NO: 950 - DNA, 27 bp, Artificial Sequence
  Synthetic
tcggttatgtgtctgtctgttaagggt

SEQ ID NO: 951 - DNA, 27 bp, Artificial Sequence
  Synthetic
caagtttcctacacatagatttggggt

SEQ ID NO: 952 - DNA, 27 bp, Artificial Sequence
  Synthetic
cctcaggaaggtgaagccacttgggat

SEQ ID NO: 953 - DNA, 27 bp, Artificial Sequence
  Synthetic
cagcatggtgcctggtactcagtgggt

SEQ ID NO: 954 - DNA, 27 bp, Artificial Sequence
  Synthetic
cactgagtaccaggcaccatgctgggt

SEQ ID NO: 955 - DNA, 27 bp, Artificial Sequence
  Synthetic
tgggtacccagagaaggcttgttgaat

SEQ ID NO: 956 - DNA, 27 bp, Artificial Sequence
  Synthetic
caagccttctctgggtacccactgagt

SEQ ID NO: 957 - DNA, 27 bp, Artificial Sequence
  Synthetic
gctccattcaacaagccttctctgggt

SEQ ID NO: 958 - DNA, 27 bp, Artificial Sequence
  Synthetic
gaaggcttgttgaatggagcaatgggt

SEQ ID NO: 959 - DNA, 27 bp, Artificial Sequence
  Synthetic
aagtaatcagaatggaccaaaatgggt

SEQ ID NO: 960 - DNA, 27 bp, Artificial Sequence
  Synthetic
acaataaatgtgaaaggagcaaagggt

SEQ ID NO: 961 - DNA, 27 bp, Artificial Sequence
  Synthetic
gctataggttgaatgtagactgggaat

SEQ ID NO: 962 - DNA, 27 bp, Artificial Sequence
  Synthetic
agaccaggagaaagctataggttgaat

SEQ ID NO: 963 - DNA, 27 bp, Artificial Sequence
  Synthetic
aaagcagggactgtgtcttaatagaat

SEQ ID NO: 964 - DNA, 27 bp, Artificial Sequence
  Synthetic
aatccaacatccgttaggctgtggagt

SEQ ID NO: 965 - DNA, 27 bp, Artificial Sequence
  Synthetic
tgggttcaactccacagcctaacggat

SEQ ID NO: 966 - DNA, 27 bp, Artificial Sequence
  Synthetic
gcccattttacaaaggagataatgggt

SEQ ID NO: 967 - DNA, 27 bp, Artificial Sequence
  Synthetic
ttgttcagagagcaaccctctctgaat

SEQ ID NO: 968 - DNA, 27 bp, Artificial Sequence
  Synthetic
gttgctctctgaacaacaatggagggt

SEQ ID NO: 969 - DNA, 27 bp, Artificial Sequence
  Synthetic
ttttattgcatggatgggaggatgaat

SEQ ID NO: 970 - DNA, 27 bp, Artificial Sequence
  Synthetic
ccaatcagaaatagtccctgcctgaat

SEQ ID NO: 971 - DNA, 27 bp, Artificial Sequence
  Synthetic
ccaggaaacagacatcaaatgtagaat

SEQ ID NO: 972 - DNA, 27 bp, Artificial Sequence
  Synthetic
catttgatgtctgtttcctggtagaat

SEQ ID NO: 973 - DNA, 27 bp, Artificial Sequence
  Synthetic
agcagaagccctgggtattatgagaat

SEQ ID NO: 974 - DNA, 27 bp, Artificial Sequence
  Synthetic
cacacatacacacatctcaggctggat

SEQ ID NO: 975 - DNA, 27 bp, Artificial Sequence
  Synthetic
actgcattgtcacctgagccaaggaat

SEQ ID NO: 976 - DNA, 27 bp, Artificial Sequence
  Synthetic
cattgtcacctgagccaaggaatgagt

SEQ ID NO: 977 - DNA, 27 bp, Artificial Sequence
  Synthetic
aaggaatgagtgtgtttcaaggagggt

SEQ ID NO: 978 - DNA, 27 bp, Artificial Sequence
  Synthetic
caagagtaaatcagcagcatttagagt

SEQ ID NO: 979 - DNA, 27 bp, Artificial Sequence
  Synthetic
atttactcttgaggagatcactgggat

SEQ ID NO: 980 - DNA, 27 bp, Artificial Sequence
  Synthetic
tatcatcccagtgatctcctcaagagt

SEQ ID NO: 981 - DNA, 27 bp, Artificial Sequence
  Synthetic
ataggcacaagccagactttgttgggt

SEQ ID NO: 982 - DNA, 27 bp, Artificial Sequence
  Synthetic
ttagggagggtgtaaatctgagggaat

SEQ ID NO: 983 - DNA, 27 bp, Artificial Sequence
  Synthetic
ttctagggagggaggcaggaggtgagt

SEQ ID NO: 984 - DNA, 27 bp, Artificial Sequence
  Synthetic
aaatgaggtatgtggtaacggaagggt

SEQ ID NO: 985 - DNA, 27 bp, Artificial Sequence
  Synthetic
gcctcgtgacctcaccttttcctgggt

SEQ ID NO: 986 - DNA, 27 bp, Artificial Sequence
  Synthetic
aaaaggtgaggtcacgaggcctagagt

SEQ ID NO: 987 - DNA, 27 bp, Artificial Sequence
  Synthetic
gaggcctagagtgctgtgccgtgggat

SEQ ID NO: 988 - DNA, 27 bp, Artificial Sequence
  Synthetic
tgctgtgccgtgggatgtggtgcgggt

SEQ ID NO: 989 - DNA, 27 bp, Artificial Sequence
  Synthetic
gagagctggagttcatgaaggtggagt

SEQ ID NO: 990 - DNA, 27 bp, Artificial Sequence
  Synthetic
ctggaggccccagggagatgacagagt

SEQ ID NO: 991 - DNA, 27 bp, Artificial Sequence
  Synthetic
atgcgaggtcagcagttgactaagggt

SEQ ID NO: 992 - DNA, 27 bp, Artificial Sequence
  Synthetic
taatgttgagtctgagtacccgagggt

SEQ ID NO: 993 - DNA, 27 bp, Artificial Sequence
  Synthetic
tcagactcaacattaccaaccatgaat

SEQ ID NO: 994 - DNA, 27 bp, Artificial Sequence
  Synthetic
tcatggttggtaatgttgagtctgagt

SEQ ID NO: 995 - DNA, 27 bp, Artificial Sequence
  Synthetic
ctgaattcatggttggtaatgttgagt

SEQ ID NO: 996 - DNA, 27 bp, Artificial Sequence
  Synthetic
gcaggttagggtgggaaggaactgaat

SEQ ID NO: 997 - DNA, 27 bp, Artificial Sequence
  Synthetic
gaagccagggcagcagcaggttagggt

SEQ ID NO: 998 - DNA, 27 bp, Artificial Sequence
  Synthetic
actgcaagtcactgtacccaggagaat

SEQ ID NO: 999 - DNA, 27 bp, Artificial Sequence
  Synthetic
gatggaggcccctgaggagagcagaat

SEQ ID NO: 1000 - DNA, 27 bp, Artificial Sequence
  Synthetic
caactcccctccaccagcagggagagt

SEQ ID NO: 1001 - DNA, 27 bp, Artificial Sequence
  Synthetic
tgactctccctgctggtggaggggagt

SEQ ID NO: 1002 - DNA, 27 bp, Artificial Sequence
  Synthetic
tagactggggaggctggaaccccggat

SEQ ID NO: 1003 - DNA, 27 bp, Artificial Sequence
  Synthetic
agcaaggccatgactctgatccggggt

SEQ ID NO: 1004 - DNA, 27 bp, Artificial Sequence
  Synthetic
atcagagtcatggccttgctttggagt

SEQ ID NO: 1005 - DNA, 27 bp, Artificial Sequence
  Synthetic
atgtcctggcatcatctcccctggggt

SEQ ID NO: 1006 - DNA, 27 bp, Artificial Sequence
  Synthetic
cctggcatcatctcccctggggtggat

SEQ ID NO: 1007 - DNA, 27 bp, Artificial Sequence
  Synthetic
actgaacaggccatgtttgcctagagt

SEQ ID NO: 1008 - DNA, 27 bp, Artificial Sequence
  Synthetic
tgcggaacaaaggagctttgggagaat

SEQ ID NO: 1009 - DNA, 27 bp, Artificial Sequence
  Synthetic
tcctggggttcccattgccttcaggat

SEQ ID NO: 1010 - DNA, 27 bp, Artificial Sequence
  Synthetic
agttatggatggggttgctcctggggt

SEQ ID NO: 1011 - DNA, 27 bp, Artificial Sequence
  Synthetic
gcaaccccatccataactcctgagggt

SEQ ID NO: 1012 - DNA, 27 bp, Artificial Sequence
  Synthetic
tggagtagggaatctgaggggtgggat

SEQ ID NO: 1013 - DNA, 27 bp, Artificial Sequence
  Synthetic
gggtgggatctgagaggtaggatgggt

SEQ ID NO: 1014 - DNA, 27 bp, Artificial Sequence
  Synthetic
gatctgagaggtaggatgggtgggagt

SEQ ID NO: 1015 - DNA, 27 bp, Artificial Sequence
  Synthetic
gagaggtaggatgggtgggagtaggat

SEQ ID NO: 1016 - DNA, 27 bp, Artificial Sequence
  Synthetic
cctctgcatggcccgggagataggggt

SEQ ID NO: 1017 - DNA, 27 bp, Artificial Sequence
  Synthetic
tttgtcgccaggaagtccagatggggt

SEQ ID NO: 1018 - DNA, 27 bp, Artificial Sequence
  Synthetic
cacccagggcccgagatgtgcgtgggt

SEQ ID NO: 1019 - DNA, 27 bp, Artificial Sequence
  Synthetic
cacccacgcacatctcgggccctgggt

SEQ ID NO: 1020 - DNA, 27 bp, Artificial Sequence
  Synthetic
atactcctgaggaaacagcagctggat

SEQ ID NO: 1021 - DNA, 27 bp, Artificial Sequence
  Synthetic
gaatccagctgctgtttcctcaggagt

SEQ ID NO: 1022 - DNA, 27 bp, Artificial Sequence
  Synthetic
cttaggtattgcacgacctgtgtgaat

SEQ ID NO: 1023 - DNA, 27 bp, Artificial Sequence
  Synthetic
ccagcagaagtagcatcatcagggagt

SEQ ID NO: 1024 - DNA, 27 bp, Artificial Sequence
  Synthetic
ctccctccacttctgggccctggggat

SEQ ID NO: 1025 - DNA, 27 bp, Artificial Sequence
  Synthetic
gcccagtgactccggcagcaggtgagt

SEQ ID NO: 1026 - DNA, 27 bp, Artificial Sequence
  Synthetic
tccggcagcaggtgagtcgacacgggt

SEQ ID NO: 1027 - DNA, 27 bp, Artificial Sequence
  Synthetic
ccgtgtcgactcacctgctgccggagt

SEQ ID NO: 1028 - DNA, 27 bp, Artificial Sequence
  Synthetic
cccaacaggaggactacacctcaggat

SEQ ID NO: 1029 - DNA, 27 bp, Artificial Sequence
  Synthetic
cctgaggtgtagtcctcctgttgggat

SEQ ID NO: 1030 - DNA, 27 bp, Artificial Sequence
  Synthetic
atctccagggtctcaaaggccggggat

SEQ ID NO: 1031 - DNA, 27 bp, Artificial Sequence
  Synthetic
caagtgctgggagaacagagaaagaat

SEQ ID NO: 1032 - DNA, 27 bp, Artificial Sequence
  Synthetic
gtaacatgggaggtgcccacttagggt

SEQ ID NO: 1033 - DNA, 27 bp, Artificial Sequence
  Synthetic
ggtaggaggggacaggtagactagggt

SEQ ID NO: 1034 - DNA, 27 bp, Artificial Sequence
  Synthetic
gcaagtgttttcagagctgaatggggt

SEQ ID NO: 1035 - DNA, 27 bp, Artificial Sequence
  Synthetic
gctcagcaagtgttttcagagctgaat

SEQ ID NO: 1036 - DNA, 27 bp, Artificial Sequence
  Synthetic
gagacaaacatagactgagcctgggat

SEQ ID NO: 1037 - DNA, 27 bp, Artificial Sequence
  Synthetic
tgggatttgctgtgtggcctggaggat

SEQ ID NO: 1038 - DNA, 27 bp, Artificial Sequence
  Synthetic
tggggagtccaaggcccagagacgggt

SEQ ID NO: 1039 - DNA, 27 bp, Artificial Sequence
  Synthetic
ggggatgggctcatggtctctcggggt

SEQ ID NO: 1040 - DNA, 27 bp, Artificial Sequence
  Synthetic
ccctacctccgggctcccagactgagt

SEQ ID NO: 1041 - DNA, 27 bp, Artificial Sequence
  Synthetic
tgaggtgctgttcccatgctttggagt

SEQ ID NO: 1042 - DNA, 27 bp, Artificial Sequence
  Synthetic
tgttcccatgctttggagttcctgagt

SEQ ID NO: 1043 - DNA, 27 bp, Artificial Sequence
  Synthetic
ctgagtgtcctctgctgtcccctggat

SEQ ID NO: 1044 - DNA, 27 bp, Artificial Sequence
  Synthetic
cccaatgggcagcttctctgtctgagt

SEQ ID NO: 1045 - DNA, 27 bp, Artificial Sequence
  Synthetic
ctgtctgagttgctgcagttgctgagt

SEQ ID NO: 1046 - DNA, 27 bp, Artificial Sequence
  Synthetic
atgaggaggaagtctgggctaatgggt

SEQ ID NO: 1047 - DNA, 27 bp, Artificial Sequence
  Synthetic
ctgggctaatgggttgcagtggtgaat

SEQ ID NO: 1048 - DNA, 27 bp, Artificial Sequence
  Synthetic
aggccccatctgtgtgcggtggtgggt

SEQ ID NO: 1049 - DNA, 27 bp, Artificial Sequence
  Synthetic
gctgtgtggttatgtgcctggctgggt

SEQ ID NO: 1050 - DNA, 27 bp, Artificial Sequence
  Synthetic
gcctggctgggtgtgcatgtgttgggt

SEQ ID NO: 1051 - DNA, 27 bp, Artificial Sequence
  Synthetic
tgcatgtgttgggttattggttggagt

SEQ ID NO: 1052 - DNA, 27 bp, Artificial Sequence
  Synthetic
atctagctatgtgtggctggtgtgggt

SEQ ID NO: 1053 - DNA, 27 bp, Artificial Sequence
  Synthetic
ctatgtgtggctggtgtgggtctgaat

SEQ ID NO: 1054 - DNA, 27 bp, Artificial Sequence
  Synthetic
tgtgggtctgaatgtctggtagagagt

SEQ ID NO: 1055 - DNA, 27 bp, Artificial Sequence
  Synthetic
gggcatctggttggtgaacatgtggat

SEQ ID NO: 1056 - DNA, 27 bp, Artificial Sequence
  Synthetic
ggtatatgtctggatggctggaggagt

SEQ ID NO: 1057 - DNA, 27 bp, Artificial Sequence
  Synthetic
ctggaggagtggaagaggttttggggt

SEQ ID NO: 1058 - DNA, 27 bp, Artificial Sequence
  Synthetic
caatgggaggctggagacaccatgagt

SEQ ID NO: 1059 - DNA, 27 bp, Artificial Sequence
  Synthetic
cgaggttgtcactggcagagagagggt

SEQ ID NO: 1060 - DNA, 27 bp, Artificial Sequence
  Synthetic
gaatttgtttgctgagcctgtgagggt

SEQ ID NO: 1061 - DNA, 27 bp, Artificial Sequence
  Synthetic
cagcaaacaaattcaattctgctgagt

SEQ ID NO: 1062 - DNA, 27 bp, Artificial Sequence
  Synthetic
attttactaaactcagcagaattgaat

SEQ ID NO: 1063 - DNA, 27 bp, Artificial Sequence
  Synthetic
gggaaattttactaaactcagcagaat

SEQ ID NO: 1064 - DNA, 27 bp, Artificial Sequence
  Synthetic
tgagtttagtaaaatttcccagggaat

SEQ ID NO: 1065 - DNA, 27 bp, Artificial Sequence
  Synthetic
ggggacacattcattataaagatgaat

SEQ ID NO: 1066 - DNA, 27 bp, Artificial Sequence
  Synthetic
ggggtcagattcatctttataatgaat

SEQ ID NO: 1067 - DNA, 27 bp, Artificial Sequence
  Synthetic
ctatgcagggcagcagcacggcagagt

SEQ ID NO: 1068 - DNA, 27 bp, Artificial Sequence
  Synthetic
acagaactggtgacttggcaggagggt

SEQ ID NO: 1069 - DNA, 27 bp, Artificial Sequence
  Synthetic
agggtggctggtctgtctggagaggat

SEQ ID NO: 1070 - DNA, 27 bp, Artificial Sequence
  Synthetic
ggagggctccccagacgggtggtgagt

SEQ ID NO: 1071 - DNA, 27 bp, Artificial Sequence
  Synthetic
aaataatattcctaggacccattgggt

SEQ ID NO: 1072 - DNA, 27 bp, Artificial Sequence
  Synthetic
tccatttacccaatgggtcctaggaat

SEQ ID NO: 1073 - DNA, 27 bp, Artificial Sequence
  Synthetic
agcagctggtccatttacccaatgggt

SEQ ID NO: 1074 - DNA, 27 bp, Artificial Sequence
  Synthetic
ggtgagcagagcttcctggccatgagt

SEQ ID NO: 1075 - DNA, 27 bp, Artificial Sequence
  Synthetic
ctaaacatttaaccaccacattggaat

SEQ ID NO: 1076 - DNA, 27 bp, Artificial Sequence
  Synthetic
aactaggctggaggcagcaccctgagt

SEQ ID NO: 1077 - DNA, 27 bp, Artificial Sequence
  Synthetic
gcaccctgagtacagagaaggctggat

SEQ ID NO: 1078 - DNA, 27 bp, Artificial Sequence
  Synthetic
acatccagccttctctgtactcagggt

SEQ ID NO: 1079 - DNA, 27 bp, Artificial Sequence
  Synthetic
ctgtgggatggagctggagggaagggt

SEQ ID NO: 1080 - DNA, 27 bp, Artificial Sequence
  Synthetic
caaaagatgatagccacatcacaggat

SEQ ID NO: 1081 - DNA, 27 bp, Artificial Sequence
  Synthetic
ttcaaagcgctcctgatacattggagt

SEQ ID NO: 1082 - DNA, 27 bp, Artificial Sequence
  Synthetic
gtcacttgcagtctgattaaggagagt

SEQ ID NO: 1083 - DNA, 27 bp, Artificial Sequence
  Synthetic
ttagtgatattgttccgtgggtggagt

SEQ ID NO: 1084 - DNA, 27 bp, Artificial Sequence
  Synthetic
tattagaaaagctagaaaattgtgagt

SEQ ID NO: 1085 - DNA, 27 bp, Artificial Sequence
  Synthetic
ttaagtaataaacattgttattagaat

SEQ ID NO: 1086 - DNA, 27 bp, Artificial Sequence
  Synthetic
ttctgttgttgggctggctgtttgaat

SEQ ID NO: 1087 - DNA, 27 bp, Artificial Sequence
  Synthetic
tcatttaagtgtaagtgtttgctgggt

SEQ ID NO: 1088 - DNA, 27 bp, Artificial Sequence
  Synthetic
agagatgaagaagttaagatacagagt

SEQ ID NO: 1089 - DNA, 27 bp, Artificial Sequence
  Synthetic
tgtaaacatttattaacttgtttgagt

SEQ ID NO: 1090 - DNA, 27 bp, Artificial Sequence
  Synthetic
ctggcaacacagtaccctgtagaggat

SEQ ID NO: 1091 - DNA, 27 bp, Artificial Sequence
  Synthetic
agggaaacagtgaatcctctacagggt

SEQ ID NO: 1092 - DNA, 27 bp, Artificial Sequence
  Synthetic
cacaaaatcacaagggaaacagtgaat

SEQ ID NO: 1093 - DNA, 27 bp, Artificial Sequence
  Synthetic
ttgctggcactgtccagtatcgagaat

SEQ ID NO: 1094 - DNA, 27 bp, Artificial Sequence
  Synthetic
ctgtccagtatcgagaatcaagagagt

SEQ ID NO: 1095 - DNA, 21 bp, Artificial Sequence
  Synthetic
ucaucacuuguucuuggcuua

SEQ ID NO: 1096 - DNA, 21 bp, Artificial Sequence
  Synthetic
aggauggugcuccacaaauuc

SEQ ID NO: 1097 - DNA, 21 bp, Artificial Sequence
  Synthetic
cacagccacacuuuaucaucc

SEQ ID NO: 1098 - DNA, 21 bp, Artificial Sequence
  Synthetic
gugaggggccaaggcacugug

SEQ ID NO: 1099 - DNA, 21 bp, Artificial Sequence
  Synthetic
cucguggagcucacauucugg

SEQ ID NO: 1100 - DNA, 21 bp, Artificial Sequence
  Synthetic
cucacauucuggagggauuug

SEQ ID NO: 1101 - DNA, 21 bp, Artificial Sequence
  Synthetic
gaccucuaaauauuuaauguc

SEQ ID NO: 1102 - DNA, 21 bp, Artificial Sequence
  Synthetic
gggaauucuagaccacauuua

SEQ ID NO: 1103 - DNA, 21 bp, Artificial Sequence
  Synthetic
agguacucaguaaaugugguc

SEQ ID NO: 1104 - DNA, 21 bp, Artificial Sequence
  Synthetic
uucuguugaugccaagcccca

SEQ ID NO: 1105 - DNA, 21 bp, Artificial Sequence
  Synthetic
cccagugaguacgauggccag

SEQ ID NO: 1106 - DNA, 21 bp, Artificial Sequence
  Synthetic
ucauggccuuuccccuucuca

SEQ ID NO: 1107 - DNA, 21 bp, Artificial Sequence
  Synthetic
aggcuucuggacuuggcacaa

SEQ ID NO: 1108 - DNA, 21 bp, Artificial Sequence
  Synthetic
cugcagguaauguucagaaca

SEQ ID NO: 1109 - DNA, 21 bp, Artificial Sequence
  Synthetic
cugugccuggaguguuguucc

SEQ ID NO: 1110 - DNA, 21 bp, Artificial Sequence
  Synthetic
agcucuuucaacacagccuga

SEQ ID NO: 1111 - DNA, 21 bp, Artificial Sequence
  Synthetic
aacccaacaucuguuaggcug

SEQ ID NO: 1112 - DNA, 21 bp, Artificial Sequence
  Synthetic
aacaucuguuaggcuguggag

SEQ ID NO: 1113 - DNA, 21 bp, Artificial Sequence
  Synthetic
gcccacuuuccaaaugagaua

SEQ ID NO: 1114 - DNA, 21 bp, Artificial Sequence
  Synthetic
ccuggagucccagcuauacuc

SEQ ID NO: 1115 - DNA, 21 bp, Artificial Sequence
  Synthetic
acuuguugaaggcugaucauu

SEQ ID NO: 1116 - DNA, 21 bp, Artificial Sequence
  Synthetic
aguaaguuuagaguugagcgu

SEQ ID NO: 1117 - DNA, 21 bp, Artificial Sequence
  Synthetic
agcagaaacagccagagcucu

SEQ ID NO: 1118 - DNA, 21 bp, Artificial Sequence
  Synthetic
agagguccagugcucagauuu

SEQ ID NO: 1119 - DNA, 21 bp, Artificial Sequence
  Synthetic
auccaagucacccauaaaccu

SEQ ID NO: 1120 - DNA, 21 bp, Artificial Sequence
  Synthetic
auccauagguuuaugggugac

SEQ ID NO: 1121 - DNA, 21 bp, Artificial Sequence
  Synthetic
ccuuaacagacagacacauaa

SEQ ID NO: 1122 - DNA, 21 bp, Artificial Sequence
  Synthetic
ucgguuaugugucugucuguu

SEQ ID NO: 1123 - DNA, 21 bp, Artificial Sequence
  Synthetic
caaguuuccuacacauagauu

SEQ ID NO: 1124 - DNA, 21 bp, Artificial Sequence
  Synthetic
ccucaggaaggugaagccacu

SEQ ID NO: 1125 - DNA, 21 bp, Artificial Sequence
  Synthetic
cagcauggugccugguacuca

SEQ ID NO: 1126 - DNA, 21 bp, Artificial Sequence
  Synthetic
cacugaguaccaggcaccaug

SEQ ID NO: 1127 - DNA, 21 bp, Artificial Sequence
  Synthetic
uggguacccagagaaggcuug

SEQ ID NO: 1128 - DNA, 21 bp, Artificial Sequence
  Synthetic
caagccuucucuggguaccca

SEQ ID NO: 1129 - DNA, 21 bp, Artificial Sequence
  Synthetic
gcuccauucaacaagccuucu

SEQ ID NO: 1130 - DNA, 21 bp, Artificial Sequence
  Synthetic
gaaggcuuguugaauggagca

SEQ ID NO: 1131 - DNA, 21 bp, Artificial Sequence
  Synthetic
aaguaaucagaauggaccaaa

SEQ ID NO: 1132 - DNA, 21 bp, Artificial Sequence
  Synthetic
acaauaaaugugaaaggagca

SEQ ID NO: 1133 - DNA, 21 bp, Artificial Sequence
  Synthetic
gcuauagguugaauguagacu

SEQ ID NO: 1134 - DNA, 21 bp, Artificial Sequence
  Synthetic
agaccaggagaaagcuauagg

SEQ ID NO: 1135 - DNA, 21 bp, Artificial Sequence
  Synthetic
aaagcagggacugugucuuaa

SEQ ID NO: 1136 - DNA, 21 bp, Artificial Sequence
  Synthetic
aauccaacauccguuaggcug

SEQ ID NO: 1137 - DNA, 21 bp, Artificial Sequence
  Synthetic
uggguucaacuccacagccua

SEQ ID NO: 1138 - DNA, 21 bp, Artificial Sequence
  Synthetic
gcccauuuuacaaaggagaua

SEQ ID NO: 1139 - DNA, 21 bp, Artificial Sequence
  Synthetic
uuguucagagagcaacccucu

SEQ ID NO: 1140 - DNA, 21 bp, Artificial Sequence
  Synthetic
guugcucucugaacaacaaug

SEQ ID NO: 1141 - DNA, 21 bp, Artificial Sequence
  Synthetic
uuuuauugcauggaugggagg

SEQ ID NO: 1142 - DNA, 21 bp, Artificial Sequence
  Synthetic
ccaaucagaaauagucccugc

SEQ ID NO: 1143 - DNA, 21 bp, Artificial Sequence
  Synthetic
ccaggaaacagacaucaaaug

SEQ ID NO: 1144 - DNA, 21 bp, Artificial Sequence
  Synthetic
cauuugaugucuguuuccugg

SEQ ID NO: 1145 - DNA, 21 bp, Artificial Sequence
  Synthetic
agcagaagcccuggguauuau

SEQ ID NO: 1146 - DNA, 21 bp, Artificial Sequence
  Synthetic
cacacauacacacaucucagg

SEQ ID NO: 1147 - DNA, 21 bp, Artificial Sequence
  Synthetic
acugcauugucaccugagcca

SEQ ID NO: 1148 - DNA, 21 bp, Artificial Sequence
  Synthetic
cauugucaccugagccaagga

SEQ ID NO: 1149 - DNA, 21 bp, Artificial Sequence
  Synthetic
aaggaaugaguguguuucaag

SEQ ID NO: 1150 - DNA, 21 bp, Artificial Sequence
  Synthetic
caagaguaaaucagcagcauu

SEQ ID NO: 1151 - DNA, 21 bp, Artificial Sequence
  Synthetic
auuuacucuugaggagaucac

SEQ ID NO: 1152 - DNA, 21 bp, Artificial Sequence
  Synthetic
uaucaucccagugaucuccuc

SEQ ID NO: 1153 - DNA, 21 bp, Artificial Sequence
  Synthetic
auaggcacaagccagacuuug

SEQ ID NO: 1154 - DNA, 21 bp, Artificial Sequence
  Synthetic
uuagggaggguguaaaucuga

SEQ ID NO: 1155 - DNA, 21 bp, Artificial Sequence
  Synthetic
uucuagggagggaggcaggag

SEQ ID NO: 1156 - DNA, 21 bp, Artificial Sequence
  Synthetic
aaaugagguaugugguaacgg

SEQ ID NO: 1157 - DNA, 21 bp, Artificial Sequence
  Synthetic
gccucgugaccucaccuuuuc

SEQ ID NO: 1158 - DNA, 21 bp, Artificial Sequence
  Synthetic
aaaaggugaggucacgaggcc

SEQ ID NO: 1159 - DNA, 21 bp, Artificial Sequence
  Synthetic
gaggccuagagugcugugccg

SEQ ID NO: 1160 - DNA, 21 bp, Artificial Sequence
  Synthetic
ugcugugccgugggauguggu

SEQ ID NO: 1161 - DNA, 21 bp, Artificial Sequence
  Synthetic
gagagcuggaguucaugaagg

SEQ ID NO: 1162 - DNA, 21 bp, Artificial Sequence
  Synthetic
cuggaggccccagggagauga

SEQ ID NO: 1163 - DNA, 21 bp, Artificial Sequence
  Synthetic
augcgaggucagcaguugacu

SEQ ID NO: 1164 - DNA, 21 bp, Artificial Sequence
  Synthetic
uaauguugagucugaguaccc

SEQ ID NO: 1165 - DNA, 21 bp, Artificial Sequence
  Synthetic
ucagacucaacauuaccaacc

SEQ ID NO: 1166 - DNA, 21 bp, Artificial Sequence
  Synthetic
ucaugguugguaauguugagu

SEQ ID NO: 1167 - DNA, 21 bp, Artificial Sequence
  Synthetic
cugaauucaugguugguaaug

SEQ ID NO: 1168 - DNA, 21 bp, Artificial Sequence
  Synthetic
gcagguuagggugggaaggaa

SEQ ID NO: 1169 - DNA, 21 bp, Artificial Sequence
  Synthetic
gaagccagggcagcagcaggu

SEQ ID NO: 1170 - DNA, 21 bp, Artificial Sequence
  Synthetic
acugcaagucacuguacccag

SEQ ID NO: 1171 - DNA, 21 bp, Artificial Sequence
  Synthetic
gauggaggccccugaggagag

SEQ ID NO: 1172 - DNA, 21 bp, Artificial Sequence
  Synthetic
caacuccccuccaccagcagg

SEQ ID NO: 1173 - DNA, 21 bp, Artificial Sequence
  Synthetic
ugacucucccugcugguggag

SEQ ID NO: 1174 - DNA, 21 bp, Artificial Sequence
  Synthetic
uagacuggggaggcuggaacc

SEQ ID NO: 1175 - DNA, 21 bp, Artificial Sequence
  Synthetic
agcaaggccaugacucugauc

SEQ ID NO: 1176 - DNA, 21 bp, Artificial Sequence
  Synthetic
aucagagucauggccuugcuu

SEQ ID NO: 1177 - DNA, 21 bp, Artificial Sequence
  Synthetic
auguccuggcaucaucucccc

SEQ ID NO: 1178 - DNA, 21 bp, Artificial Sequence
  Synthetic
ccuggcaucaucuccccuggg

SEQ ID NO: 1179 - DNA, 21 bp, Artificial Sequence
  Synthetic
acugaacaggccauguuugcc

SEQ ID NO: 1180 - DNA, 21 bp, Artificial Sequence
  Synthetic
ugcggaacaaaggagcuuugg

SEQ ID NO: 1181 - DNA, 21 bp, Artificial Sequence
  Synthetic
uccugggguucccauugccuu

SEQ ID NO: 1182 - DNA, 21 bp, Artificial Sequence
  Synthetic
aguuauggaugggguugcucc

SEQ ID NO: 1183 - DNA, 21 bp, Artificial Sequence
  Synthetic
gcaaccccauccauaacuccu

SEQ ID NO: 1184 - DNA, 21 bp, Artificial Sequence
  Synthetic
uggaguagggaaucugagggg

SEQ ID NO: 1185 - DNA, 21 bp, Artificial Sequence
  Synthetic
gggugggaucugagagguagg

SEQ ID NO: 1186 - DNA, 21 bp, Artificial Sequence
  Synthetic
gaucugagagguaggaugggu

SEQ ID NO: 1187 - DNA, 21 bp, Artificial Sequence
  Synthetic
gagagguaggaugggugggag

SEQ ID NO: 1188 - DNA, 21 bp, Artificial Sequence
  Synthetic
ccucugcauggcccgggagau

SEQ ID NO: 1189 - DNA, 21 bp, Artificial Sequence
  Synthetic
uuugucgccaggaaguccaga

SEQ ID NO: 1190 - DNA, 21 bp, Artificial Sequence
  Synthetic
cacccagggcccgagaugugc

SEQ ID NO: 1191 - DNA, 21 bp, Artificial Sequence
  Synthetic
cacccacgcacaucucgggcc

SEQ ID NO: 1192 - DNA, 21 bp, Artificial Sequence
  Synthetic
auacuccugaggaaacagcag

SEQ ID NO: 1193 - DNA, 21 bp, Artificial Sequence
  Synthetic
gaauccagcugcuguuuccuc

SEQ ID NO: 1194 - DNA, 21 bp, Artificial Sequence
  Synthetic
cuuagguauugcacgaccugu

SEQ ID NO: 1195 - DNA, 21 bp, Artificial Sequence
  Synthetic
ccagcagaaguagcaucauca

SEQ ID NO: 1196 - DNA, 21 bp, Artificial Sequence
  Synthetic
cucccuccacuucugggcccu

SEQ ID NO: 1197 - DNA, 21 bp, Artificial Sequence
  Synthetic
gcccagugacuccggcagcag

SEQ ID NO: 1198 - DNA, 21 bp, Artificial Sequence
  Synthetic
uccggcagcaggugagucgac

SEQ ID NO: 1199 - DNA, 21 bp, Artificial Sequence
  Synthetic
ccgugucgacucaccugcugc

SEQ ID NO: 1200 - DNA, 21 bp, Artificial Sequence
  Synthetic
cccaacaggaggacuacaccu

SEQ ID NO: 1201 - DNA, 21 bp, Artificial Sequence
  Synthetic
ccugagguguaguccuccugu

SEQ ID NO: 1202 - DNA, 21 bp, Artificial Sequence
  Synthetic
aucuccagggucucaaaggcc

SEQ ID NO: 1203 - DNA, 21 bp, Artificial Sequence
  Synthetic
caagugcugggagaacagaga

SEQ ID NO: 1204 - DNA, 21 bp, Artificial Sequence
  Synthetic
guaacaugggaggugcccacu

SEQ ID NO: 1205 - DNA, 21 bp, Artificial Sequence
  Synthetic
gguaggaggggacagguagac

SEQ ID NO: 1206 - DNA, 21 bp, Artificial Sequence
  Synthetic
gcaaguguuuucagagcugaa

SEQ ID NO: 1207 - DNA, 21 bp, Artificial Sequence
  Synthetic
gcucagcaaguguuuucagag

SEQ ID NO: 1208 - DNA, 21 bp, Artificial Sequence
  Synthetic
gagacaaacauagacugagcc

SEQ ID NO: 1209 - DNA, 21 bp, Artificial Sequence
  Synthetic
ugggauuugcuguguggccug

SEQ ID NO: 1210 - DNA, 21 bp, Artificial Sequence
  Synthetic
uggggaguccaaggcccagag

SEQ ID NO: 1211 - DNA, 21 bp, Artificial Sequence
  Synthetic
ggggaugggcucauggucucu

SEQ ID NO: 1212 - DNA, 21 bp, Artificial Sequence
  Synthetic
cccuaccuccgggcucccaga

SEQ ID NO: 1213 - DNA, 21 bp, Artificial Sequence
  Synthetic
ugaggugcuguucccaugcuu

SEQ ID NO: 1214 - DNA, 21 bp, Artificial Sequence
  Synthetic
uguucccaugcuuuggaguuc

SEQ ID NO: 1215 - DNA, 21 bp, Artificial Sequence
  Synthetic
cugaguguccucugcuguccc

SEQ ID NO: 1216 - DNA, 21 bp, Artificial Sequence
  Synthetic
cccaaugggcagcuucucugu

SEQ ID NO: 1217 - DNA, 21 bp, Artificial Sequence
  Synthetic
cugucugaguugcugcaguug

SEQ ID NO: 1218 - DNA, 21 bp, Artificial Sequence
  Synthetic
augaggaggaagucugggcua

SEQ ID NO: 1219 - DNA, 21 bp, Artificial Sequence
  Synthetic
cugggcuaauggguugcagug

SEQ ID NO: 1220 - DNA, 21 bp, Artificial Sequence
  Synthetic
aggccccaucugugugcggug

SEQ ID NO: 1221 - DNA, 21 bp, Artificial Sequence
  Synthetic
gcugugugguuaugugccugg

SEQ ID NO: 1222 - DNA, 21 bp, Artificial Sequence
  Synthetic
gccuggcugggugugcaugug

SEQ ID NO: 1223 - DNA, 21 bp, Artificial Sequence
  Synthetic
ugcauguguuggguuauuggu

SEQ ID NO: 1224 - DNA, 21 bp, Artificial Sequence
  Synthetic
aucuagcuauguguggcuggu

SEQ ID NO: 1225 - DNA, 21 bp, Artificial Sequence
  Synthetic
cuauguguggcuggugugggu

SEQ ID NO: 1226 - DNA, 21 bp, Artificial Sequence
  Synthetic
ugugggucugaaugucuggua

SEQ ID NO: 1227 - DNA, 21 bp, Artificial Sequence
  Synthetic
gggcaucugguuggugaacau

SEQ ID NO: 1228 - DNA, 21 bp, Artificial Sequence
  Synthetic
gguauaugucuggauggcugg

SEQ ID NO: 1229 - DNA, 21 bp, Artificial Sequence
  Synthetic
cuggaggaguggaagagguuu

SEQ ID NO: 1230 - DNA, 21 bp, Artificial Sequence
  Synthetic
caaugggaggcuggagacacc

SEQ ID NO: 1231 - DNA, 21 bp, Artificial Sequence
  Synthetic
cgagguugucacuggcagaga

SEQ ID NO: 1232 - DNA, 21 bp, Artificial Sequence
  Synthetic
gaauuuguuugcugagccugu

SEQ ID NO: 1233 - DNA, 21 bp, Artificial Sequence
  Synthetic
cagcaaacaaauucaauucug

SEQ ID NO: 1234 - DNA, 21 bp, Artificial Sequence
  Synthetic
auuuuacuaaacucagcagaa

SEQ ID NO: 1235 - DNA, 21 bp, Artificial Sequence
  Synthetic
gggaaauuuuacuaaacucag

SEQ ID NO: 1236 - DNA, 21 bp, Artificial Sequence
  Synthetic
ugaguuuaguaaaauuuccca

SEQ ID NO: 1237 - DNA, 21 bp, Artificial Sequence
  Synthetic
ggggacacauucauuauaaag

SEQ ID NO: 1238 - DNA, 21 bp, Artificial Sequence
  Synthetic
ggggucagauucaucuuuaua

SEQ ID NO: 1239 - DNA, 21 bp, Artificial Sequence
  Synthetic
cuaugcagggcagcagcacgg

SEQ ID NO: 1240 - DNA, 21 bp, Artificial Sequence
  Synthetic
acagaacuggugacuuggcag

SEQ ID NO: 1241 - DNA, 21 bp, Artificial Sequence
  Synthetic
aggguggcuggucugucugga

SEQ ID NO: 1242 - DNA, 21 bp, Artificial Sequence
  Synthetic
ggagggcuccccagacgggug

SEQ ID NO: 1243 - DNA, 21 bp, Artificial Sequence
  Synthetic
aaauaauauuccuaggaccca

SEQ ID NO: 1244 - DNA, 21 bp, Artificial Sequence
  Synthetic
uccauuuacccaauggguccu

SEQ ID NO: 1245 - DNA, 21 bp, Artificial Sequence
  Synthetic
agcagcugguccauuuaccca

SEQ ID NO: 1246 - DNA, 21 bp, Artificial Sequence
  Synthetic
ggugagcagagcuuccuggcc

SEQ ID NO: 1247 - DNA, 21 bp, Artificial Sequence
  Synthetic
cuaaacauuuaaccaccacau

SEQ ID NO: 1248 - DNA, 21 bp, Artificial Sequence
  Synthetic
aacuaggcuggaggcagcacc

SEQ ID NO: 1249 - DNA, 21 bp, Artificial Sequence
  Synthetic
gcacccugaguacagagaagg

SEQ ID NO: 1250 - DNA, 21 bp, Artificial Sequence
  Synthetic
acauccagccuucucuguacu

SEQ ID NO: 1251 - DNA, 21 bp, Artificial Sequence
  Synthetic
cugugggauggagcuggaggg

SEQ ID NO: 1252 - DNA, 21 bp, Artificial Sequence
  Synthetic
caaaagaugauagccacauca

SEQ ID NO: 1253 - DNA, 21 bp, Artificial Sequence
  Synthetic
uucaaagcgcuccugauacau

SEQ ID NO: 1254 - DNA, 21 bp, Artificial Sequence
  Synthetic
gucacuugcagucugauuaag

SEQ ID NO: 1255 - DNA, 21 bp, Artificial Sequence
  Synthetic
uuagugauauuguuccguggg

SEQ ID NO: 1256 - DNA, 21 bp, Artificial Sequence
  Synthetic
uauuagaaaagcuagaaaauu

SEQ ID NO: 1257 - DNA, 21 bp, Artificial Sequence
  Synthetic
uuaaguaauaaacauuguuau

SEQ ID NO: 1258 - DNA, 21 bp, Artificial Sequence
  Synthetic
uucuguuguugggcuggcugu

SEQ ID NO: 1259 - DNA, 21 bp, Artificial Sequence
  Synthetic
ucauuuaaguguaaguguuug

SEQ ID NO: 1260 - DNA, 21 bp, Artificial Sequence
  Synthetic
agagaugaagaaguuaagaua

SEQ ID NO: 1261 - DNA, 21 bp, Artificial Sequence
  Synthetic
uguaaacauuuauuaacuugu

SEQ ID NO: 1262 - DNA, 21 bp, Artificial Sequence
  Synthetic
cuggcaacacaguacccugua

SEQ ID NO: 1263 - DNA, 21 bp, Artificial Sequence
  Synthetic
agggaaacagugaauccucua

SEQ ID NO: 1264 - DNA, 21 bp, Artificial Sequence
  Synthetic
cacaaaaucacaagggaaaca

SEQ ID NO: 1265 - DNA, 21 bp, Artificial Sequence
  Synthetic
uugcuggcacuguccaguauc

SEQ ID NO: 1266 - DNA, 21 bp, Artificial Sequence
  Synthetic
cuguccaguaucgagaaucaa

SEQ ID NO: 1267 - DNA, 97 bp, Artificial Sequence
  Synthetic
  misc_feature (1)..(20): n is a, c, g, t or u
nnnnnnnnnnnnnnnnnnnnguuuuagagcuagaaauagcaaguuaaaauaaggcuaguccguuaucaacuugaaaaaguggcaccgagucggugcu

SEQ ID NO: 1268 - protein, 1105 aa, Artificial Sequence
  Synthetic
MHHHHHHHHGSGGSGGSGPKKKRKVGSGGSGGSGKRNYILGLDIGITSVGYGIIDYETRDVIDAGVRLFKEANVENNEGRRSKRGARRLKRRRRHRIQRVKKLLFDYNLLTDHSELSGINPYEARVKGLSQKLSEEEFSAALLHLAKRRGVHNVNEVEEDTGNELSTKEQISRNSKALEEKYVAELQLERLKKDGEVRGSINRFKTSDYVKEAKQLLKVQKAYHQLDQSFIDTYIDLLETRRTYYEGPGEGSPFGWKDIKEWYEMLMGHCTYFPEELRSVKYAYNADLYNALNDLNNLVITRDENEKLEYYEKFQIIENVFKQKKKPTLKQIAKEILVNEEDIKGYRVTSTGKPEFTNLKVYHDIKDITARKEIIENAELLDQIAKILTIYQSSEDIQEELTNLNSELTQEEIEQISNLKGYTGTHNLSLKAINLILDELWHTNDNQIAIFNRLKLVPKKVDLSQQKEIPTTLVDDFILSPVVKRSFIQSIKVINAIIKKYGLPNDIIIELAREKNSKDAQKMINEMQKRNRQTNERIEEIIRTTGKENAKYLIEKIKLHDMQEGKCLYSLEAIPLEDLLNNPFNYEVDHIIPRSVSFDNSFNNKVLVKQEENSKKGNRTPFQYLSSSDSKISYETFKKHILNLAKGKGRISKTKKEYLLEERDINRFSVQKDFINRNLVDTRYATRGLMNLLRSYFRVNNLDVKVKSINGGFTSFLRRKWKFKKERNKGYKHHAEDALIIANADFIFKEWKKLDKAKKVMENQMFEEKQAESMPEIETEQEYKEIFITPHQIKHIKDFKDYKYSHRVDKKPNRELINDTLYSTRKDDKGNTLIVNNLNGLYDKDNDKLKKLINKSPEKLLMYHHDPQTYQKLKLIMEQYGDEKNPLYKYYEETGNYLTKYSKKDNGPVIKKIKYYGNKLNAHLDITDDYPNSRNKVVKLSLKPYRFDVYLDNGVYKFVTVKNLDVIKKENYYEVNSKCYEEAKKLKKISNQAEFIASFYNNDLIKINGELYRVIGVNNDLLNRIEVNMIDITYREYLENMNDKRPPRIIKTIASKTQSIKKYSTDILGNLYEVKSKKHPQIIKKGGSAGSGGSGGSGPKKKRKV

SEQ ID NO: 1269 - DNA, 99 bp, Artificial Sequence
  Synthetic
  misc_feature (1)..(22): n is a, c, g, t or u
nnnnnnnnnnnnnnnnnnnnnnguuuuaguacucuggaaacagaaucuacugaaacaagacaauaugucguguuuaucccaucaauuuauuggugggau

SEQ ID NO: 1270 - protein, 1095 aa, Artificial Sequence
  Synthetic
MPKKKRKVGMNQKFILGLDIGITSVGYGLIDYETKNIIDAGVRLFPEANVENNEGRRSKRGSRRLKRRRIHRLERVKKLLEDYNLLDQSQIPQSTNPYAIRVKGLSEALSKDELVIALLHIAKRRGIHKIDVIDSNDDVGNELSTKEQLNKNSKLLKDKFVCQIQLERMNEGQVRGEKNRFKTADIIKEIIQLLNVQKNFHQLDENFINKYIELVEMRREYFEGPGKGSPYGWEGDPKAWYETLMGHCTYFPDELRSVKYAYSADLFNALNDLNNLVIQRDGLSKLEYHEKYHIIENVFKQKKKPTLKQIANEINVNPEDIKGYRITKSGKPQFTEFKLYHDLKSVLFDQSILENEDVLDQIAEILTIYQDKDSIKSKLTELDILLNEEDKENIAQLTGYTGTHRLSLKCIRLVLEEQWYSSRNQMEIFTHLNIKPKKINLTAANKIPKAMIDEFILSPVVKRTFGQAINLINKIIEKYGVPEDIIIELARENNSKDKQKFINEMQKKNENTRKRINEIIGKYGNQNAKRLVEKIRLHDEQEGKCLYSLESIPLEDLLNNPNHYEVDHIIPRSVSFDNSYHNKVLVKQSENSKKSNLTPYQYFNSGKSKLSYNQFKQHILNLSKSQDRISKKKKEYLLEERDINKFEVQKEFINRNLVDTRYATRELTNYLKAYFSANNMNVKVKTINGSFTDYLRKVWKFKKERNHGYKHHAEDALIIANADFLFKENKKLKAVNSVLEKPEIETKQLDIQVDSEDNYSEMFIIPKQVQDIKDFRNFKYSHRVDKKPNRQLINDTLYSTRKKDNSTYIVQTIKDIYAKDNTTLKKQFDKSPEKFLMYQHDPRTFEKLEVIMKQYANEKNPLAKYHEETGEYLTKYSKKNNGPIVKSLKYIGNKLGSHLDVTHQFKSSTKKLVKLSIKPYRFDVYLTDKGYKFITISYLDVLKKDNYYYIPEQKYDKLKLGKAIDKNAKFIASFYKNDLIKLDGEIYKIIGVNSDTRNMIELDLPDIRYKEYCELNNIKGEPRIKKTIGKKVNSIEKLTTDVLGNVFTNTQYTKPQLLFKRGNGSGGSGGSGAKRPAATKKAGQAKKKKHHHHHH

SEQ ID NO: 1271 - DNA, 98 bp, Artificial Sequence
  Synthetic
  misc_feature (1)..(21): n is a, c, g, t or u
nnnnnnnnnnnnnnnnnnnnnguuuuaguacucuggaaacagaaucuacuaaaacaaggcaaaaugccguguuuaucucgucaacuuguuggcgagau

SEQ ID NO: 1272 - protein, 1105 aa, Artificial Sequence; identical to SEQ ID NO: 1268
  Synthetic

SEQ ID NO: 1273 - DNA, 20 bp, Artificial Sequence
  Synthetic
tgatatcggaggcagcatcc

SEQ ID NO: 1274 - DNA, 20 bp, Artificial Sequence
  Synthetic
cttcaggccactcttgctga

SEQ ID NO: 1275 - DNA, 19 bp, Artificial Sequence
  Synthetic
cttcccctcctccttctgc

SEQ ID NO: 1276 - DNA, 22 bp, Artificial Sequence
  Synthetic
catagactgagcctgggatttg

SEQ ID NO: 1277 - DNA, 20 bp, Artificial Sequence
  Synthetic
caaagcatgggaacagcacc

SEQ ID NO: 1278 - DNA, 20 bp, Artificial Sequence
  Synthetic
aggatgtgacaacccgtctc

SEQ ID NO: 1279 - DNA, 20 bp, Artificial Sequence
  Synthetic
cccagtgactagtgttcagc

SEQ ID NO: 1280 - DNA, 20 bp, Artificial Sequence
  Synthetic
ctttcgctcgacatccactg

SEQ ID NO: 1281 - DNA, 22 bp, Artificial Sequence
  Synthetic
ctggatcaggagcacagtagac

SEQ ID NO: 1282 - DNA, 23 bp, Artificial Sequence
  Synthetic
  misc_feature (1)..(21): n is a, c, g, t or u
nnnnnnnnnnnnnnnnnnnnngg

SEQ ID NO: 1283 - DNA, 24 bp, Artificial Sequence
  Synthetic
  misc_feature (1)..(22): n is a, c, g, t or u
nnnnnnnnnnnnnnnnnnnnnngg

SEQ ID NO: 1284 - DNA, 27 bp, Artificial Sequence
  Synthetic
  misc_feature (1)..(23): n is a, c, g, t or u
nnnnnnnnnnnnnnnnnnnnnnngrrt

SEQ ID NO: 1285 - DNA, 77 bp, Artificial Sequence
  Synthetic
guuuuagagcuagaaauagcaaguuaaaauaaggcuaguccguuaucaacuugaaaaaguggcaccgagucggugcu

SEQ ID NO: 1286 - DNA, 77 bp, Artificial Sequence
  Synthetic
guuuuaguacucuggaaacagaaucuacugaaacaagacaauaugucguguuuaucccaucaauuuauuggugggau

SEQ ID NO: 1287 - DNA, 77 bp, Artificial Sequence
  Synthetic
guuuuaguacucuggaaacagaaucuacuaaaacaaggcaaaaugccguguuuaucucgucaacuuguuggcgagau

SEQ ID NO: 1288 - protein, 7 aa, Artificial Sequence
  Synthetic
PKKKRKV

SEQ ID NO: 1289 - protein, 7 aa, Artificial Seuqence
  Synthetic
PKKKRRV

SEQ ID NO: 1290 - protein, 16 aa, Artificial Sequence
  Synthetic
KRPAATKKAGQAKKKK

SEQ ID NO: 1291 - DNA, 20 bp, Artificial Sequence
  Synthetic
tctaacagctggcatgtctg

SEQ ID NO: 1292 - DNA, 20 bp, Artificial Sequence
  Synthetic
tctaacagctggcatgtctg

SEQ ID NO: 1293 - DNA, 20 bp, Artificial Sequence
  Synthetic
tctaacagctggcatgtctg

SEQ ID NO: 1294 - DNA, 20 bp, Artificial Sequence
  Synthetic
tctaacagctggcatgtctg

SEQ ID NO: 1295 - DNA, 20 bp, Artificial Sequence
  Synthetic
tctaacagctggcatgtctg

SEQ ID NO: 1296 - DNA, 20 bp, Artificial Sequence
  Synthetic
tctaacagctggcatgtctg

SEQ ID NO: 1297 - DNA, 20 bp, Artificial Sequence
  Synthetic
tctaacagctggcatgtctg

SEQ ID NO: 1298 - DNA, 20 bp, Artificial Sequence
  Synthetic
tctaacagctggcatgtctg

SEQ ID NO: 1299 - DNA, 20 bp, Artificial Sequence
  Synthetic
tctaacagctggcatgtctg

SEQ ID NO: 1300 - DNA, 20 bp, Artificial Sequence
  Synthetic
tctaacagctggcatgtctg

SEQ ID NO: 1301 - DNA, 20 bp, Artificial Sequence
  Synthetic
tctaacagctggcatgtctg

SEQ ID NO: 1302 - DNA, 20 bp, Artificial Sequence
  Synthetic
tctaacagctggcatgtctg

SEQ ID NO: 1303 - DNA, 20 bp, Artificial Sequence
  Synthetic
tctaacagctggcatgtctg

SEQ ID NO: 1304 - DNA, 20 bp, Artificial Sequence
  Synthetic
tctaacagctggcatgtctg

SEQ ID NO: 1305 - DNA, 20 bp, Artificial Sequence
  Synthetic
tctaacagctggcatgtctg

SEQ ID NO: 1306 - DNA, 20 bp, Artificial Sequence
  Synthetic
tctaacagctggcatgtctg

SEQ ID NO: 1307 - DNA, 20 bp, Artificial Sequence
  Synthetic
tctaacagctggcatgtctg

SEQ ID NO: 1308 - DNA, 20 bp, Artificial Sequence
  Synthetic
tctaacagctggcatgtctg

SEQ ID NO: 1309 - DNA, 20 bp, Artificial Sequence
  Synthetic
tctaacagctggcatgtctg

SEQ ID NO: 1310 - DNA, 20 bp, Artificial Sequence
  Synthetic
tctaacagctggcatgtctg

SEQ ID NO: 1311 - DNA, 20 bp, Artificial Sequence
  Synthetic
tctaacagctggcatgtctg

SEQ ID NO: 1312 - DNA, 20 bp, Artificial Sequence
  Synthetic
catcagtctggagctaggca

SEQ ID NO: 1313 - DNA, 20 bp, Artificial Sequence
  Synthetic
catcagtctggagctaggca

SEQ ID NO: 1314 - DNA, 20 bp, Artificial Sequence
  Synthetic
catcagtctggagctaggca

SEQ ID NO: 1315 - DNA, 20 bp, Artificial Sequence
  Synthetic
catcagtctggagctaggca

SEQ ID NO: 1316 - DNA, 20 bp, Artificial Sequence
  Synthetic
catcagtctggagctaggca

SEQ ID NO: 1317 - DNA, 20 bp, Artificial Sequence
  Synthetic
catcagtctggagctaggca

SEQ ID NO: 1318 - DNA, 20 bp, Artificial Sequence
  Synthetic
catcagtctggagctaggca

SEQ ID NO: 1319 - DNA, 20 bp, Artificial Sequence
  Synthetic
catcagtctggagctaggca

SEQ ID NO: 1320 - DNA, 20 bp, Artificial Sequence
  Synthetic
catcagtctggagctaggca

SEQ ID NO: 1321 - DNA, 20 bp, Artificial Sequence
  Synthetic
catcagtctggagctaggca

SEQ ID NO: 1322 - DNA, 20 bp, Artificial Sequence
  Synthetic
catcagtctggagctaggca

SEQ ID NO: 1323 - DNA, 20 bp, Artificial Sequence
  Synthetic
catcagtctggagctaggca

SEQ ID NO: 1324 - DNA, 20 bp, Artificial Sequence
  Synthetic
catcagtctggagctaggca

SEQ ID NO: 1325 - DNA, 20 bp, Artificial Sequence
  Synthetic
aagctctccagatccccttg

SEQ ID NO: 1326 - DNA, 20 bp, Artificial Sequence
  Synthetic
aagctctccagatccccttg

SEQ ID NO: 1327 - DNA, 20 bp, Artificial Sequence
  Synthetic
aagctctccagatccccttg

SEQ ID NO: 1328 - DNA, 20 bp, Artificial Sequence
  Synthetic
aagctctccagatccccttg

SEQ ID NO: 1329 - DNA, 20 bp, Artificial Sequence
  Synthetic
aagctctccagatccccttg

SEQ ID NO: 1330 - DNA, 20 bp, Artificial Sequence
  Synthetic
aagctctccagatccccttg

SEQ ID NO: 1331 - DNA, 20 bp, Artificial Sequence
  Synthetic
aagctctccagatccccttg

SEQ ID NO: 1332 - DNA, 20 bp, Artificial Sequence
  Synthetic
aagctctccagatccccttg

SEQ ID NO: 1333 - DNA, 20 bp, Artificial Sequence
  Synthetic
aagctctccagatccccttg

SEQ ID NO: 1334 - DNA, 20 bp, Artificial Sequence
  Synthetic
aagctctccagatccccttg

SEQ ID NO: 1335 - DNA, 20 bp, Artificial Sequence
  Synthetic
aagctctccagatccccttg

SEQ ID NO: 1336 - DNA, 20 bp, Artificial Sequence
  Synthetic
aagctctccagatccccttg

SEQ ID NO: 1337 - DNA, 20 bp, Artificial Sequence
  Synthetic
aagctctccagatccccttg

SEQ ID NO: 1338 - DNA, 20 bp, Artificial Sequence
  Synthetic
aagctctccagatccccttg

SEQ ID NO: 1339 - DNA, 20 bp, Artificial Sequence
  Synthetic
aagctctccagatccccttg

SEQ ID NO: 1340 - DNA, 20 bp, Artificial Sequence
  Synthetic
aagctctccagatccccttg

SEQ ID NO: 1341 - DNA, 20 bp, Artificial Sequence
  Synthetic
aagctctccagatccccttg

SEQ ID NO: 1342 - DNA, 20 bp, Artificial Sequence
  Synthetic
aagctctccagatccccttg

SEQ ID NO: 1343 - DNA, 20 bp, Artificial Sequence
  Synthetic
aagctctccagatccccttg

SEQ ID NO: 1344 - DNA, 20 bp, Artificial Sequence
  Synthetic
aagctctccagatccccttg

SEQ ID NO: 1345 - DNA, 20 bp, Artificial Sequence
  Synthetic
aagctctccagatccccttg

SEQ ID NO: 1346 - DNA, 20 bp, Artificial Sequence
  Synthetic
agaccagacttgttgcccaa

SEQ ID NO: 1347 - DNA, 20 bp, Artificial Sequence
  Synthetic
agaccagacttgttgcccaa

SEQ ID NO: 1348 - DNA, 20 bp, Artificial Sequence
  Synthetic
agaccagacttgttgcccaa

SEQ ID NO: 1349 - DNA, 20 bp, Artificial Sequence
  Synthetic
agaccagacttgttgcccaa

SEQ ID NO: 1350 - DNA, 20 bp, Artificial Sequence
  Synthetic
agaccagacttgttgcccaa

SEQ ID NO: 1351 - DNA, 20 bp, Artificial Sequence
  Synthetic
agaccagacttgttgcccaa

SEQ ID NO: 1352 - DNA, 20 bp, Artificial Sequence
  Synthetic
agaccagacttgttgcccaa

SEQ ID NO: 1353 - DNA, 20 bp, Artificial Sequence
  Synthetic
agaccagacttgttgcccaa

SEQ ID NO: 1354 - DNA, 20 bp, Artificial Sequence
  Synthetic
agaccagacttgttgcccaa

SEQ ID NO: 1355 - DNA, 20 bp, Artificial Sequence
  Synthetic
agaccagacttgttgcccaa

SEQ ID NO: 1356 - DNA, 20 bp, Artificial Sequence
  Synthetic
agaccagacttgttgcccaa

SEQ ID NO: 1357 - DNA, 20 bp, Artificial Sequence
  Synthetic
agaccagacttgttgcccaa

SEQ ID NO: 1358 - DNA, 20 bp, Artificial Sequence
  Synthetic
agaccagacttgttgcccaa

SEQ ID NO: 1359 - DNA, 19 bp, Artificial Sequence
  Synthetic
gggcgcagtcttcagcatt

SEQ ID NO: 1360 - DNA, 19 bp, Artificial Sequence
  Synthetic
gggcgcagtcttcagcatt

SEQ ID NO: 1361 - DNA, 19 bp, Artificial Sequence
  Synthetic
gggcgcagtcttcagcatt

SEQ ID NO: 1362 - DNA, 19 bp, Artificial Sequence
  Synthetic
gggcgcagtcttcagcatt

SEQ ID NO: 1363 - DNA, 19 bp, Artificial Sequence
  Synthetic
gggcgcagtcttcagcatt

SEQ ID NO: 1364 - DNA, 19 bp, Artificial Sequence
  Synthetic
gggcgcagtcttcagcatt

SEQ ID NO: 1365 - DNA, 19 bp, Artificial Sequence
  Synthetic
gggcgcagtcttcagcatt

SEQ ID NO: 1366 - DNA, 19 bp, Artificial Sequence
  Synthetic
gggcgcagtcttcagcatt

SEQ ID NO: 1367 - DNA, 19 bp, Artificial Sequence
  Synthetic
gggcgcagtcttcagcatt

SEQ ID NO: 1368 - DNA, 19 bp, Artificial Sequence
  Synthetic
gggcgcagtcttcagcatt

SEQ ID NO: 1369 - DNA, 20 bp, Artificial Sequence
  Synthetic
gtcctcaacccctggcatcc

SEQ ID NO: 1370 - DNA, 20 bp, Artificial Sequence
  Synthetic
gtcctcaacccctggcatcc

SEQ ID NO: 1371 - DNA, 20 bp, Artificial Sequence
  Synthetic
gtcctcaacccctggcatcc

SEQ ID NO: 1372 - DNA, 20 bp, Artificial Sequence
  Synthetic
gtcctcaacccctggcatcc

SEQ ID NO: 1373 - DNA, 20 bp, Artificial Sequence
  Synthetic
gtcctcaacccctggcatcc

SEQ ID NO: 1374 - DNA, 20 bp, Artificial Sequence
  Synthetic
gtcctcaacccctggcatcc

SEQ ID NO: 1375 - DNA, 20 bp, Artificial Sequence
  Synthetic
gtcctcaacccctggcatcc

SEQ ID NO: 1376 - DNA, 20 bp, Artificial Sequence
  Synthetic
gtcctcaacccctggcatcc

SEQ ID NO: 1377 - DNA, 20 bp, Artificial Sequence
  Synthetic
gtcctcaacccctggcatcc

SEQ ID NO: 1378 - DNA, 20 bp, Artificial Sequence
  Synthetic
gtcctcaacccctggcatcc

SEQ ID NO: 1379 - DNA, 20 bp, Artificial Sequence
  Synthetic
gtcctcaacccctggcatcc

SEQ ID NO: 1380 - DNA, 18 bp, Artificial Sequence
  Synthetic
agcatgtgcctgtagttc

SEQ ID NO: 1381 - DNA, 18 bp, Artificial Sequence
  Synthetic
agcatgtgcctgtagttc

SEQ ID NO: 1382 - DNA, 18 bp, Artificial Sequence
  Synthetic
agcatgtgcctgtagttc

SEQ ID NO: 1383 - DNA, 18 bp, Artificial Sequence
  Synthetic
agcatgtgcctgtagttc

SEQ ID NO: 1384 - DNA, 18 bp, Artificial Sequence
  Synthetic
agcatgtgcctgtagttc

SEQ ID NO: 1385 - DNA, 18 bp, Artificial Sequence
  Synthetic
agcatgtgcctgtagttc

SEQ ID NO: 1386 - DNA, 18 bp, Artificial Sequence
  Synthetic
agcatgtgcctgtagttc

SEQ ID NO: 1387 - DNA, 18 bp, Artificial Sequence
  Synthetic
agcatgtgcctgtagttc

SEQ ID NO: 1388 - DNA, 18 bp, Artificial Sequence
  Synthetic
agcatgtgcctgtagttc

SEQ ID NO: 1389 - DNA, 18 bp, Artificial Sequence
  Synthetic
agcatgtgcctgtagttc

SEQ ID NO: 1390 - DNA, 18 bp, Artificial Sequence
  Synthetic
agcatgtgcctgtagttc

SEQ ID NO: 1391 - DNA, 18 bp, Artificial Sequence
  Synthetic
agcatgtgcctgtagttc

SEQ ID NO: 1392 - DNA, 18 bp, Artificial Sequence
  Synthetic
agcatgtgcctgtagttc

SEQ ID NO: 1393 - DNA, 20 bp, Artificial Sequence
  Synthetic
tctaacagctggcatgtctg

SEQ ID NO: 1394 - DNA, 20 bp, Artificial Sequence
  Synthetic
tctaacagctggcatgtctg

SEQ ID NO: 1395 - DNA, 20 bp, Artificial Sequence
  Synthetic
tctaacagctggcatgtctg

SEQ ID NO: 1396 - DNA, 20 bp, Artificial Sequence
  Synthetic
tctaacagctggcatgtctg

SEQ ID NO: 1397 - DNA, 20 bp, Artificial Sequence
  Synthetic
tctaacagctggcatgtctg

SEQ ID NO: 1398 - DNA, 20 bp, Artificial Sequence
  Synthetic
tctaacagctggcatgtctg

SEQ ID NO: 1399 - DNA, 20 bp, Artificial Sequence
  Synthetic
tctaacagctggcatgtctg

SEQ ID NO: 1400 - DNA, 20 bp, Artificial Sequence
  Synthetic
tctaacagctggcatgtctg

SEQ ID NO: 1401 - DNA, 20 bp, Artificial Sequence
  Synthetic
tctaacagctggcatgtctg

SEQ ID NO: 1402 - DNA, 20 bp, Artificial Sequence
  Synthetic
tctaacagctggcatgtctg

SEQ ID NO: 1403 - DNA, 20 bp, Artificial Sequence
  Synthetic
tctaacagctggcatgtctg

SEQ ID NO: 1404 - DNA, 20 bp, Artificial Sequence
  Synthetic
tctaacagctggcatgtctg

SEQ ID NO: 1405 - DNA, 20 bp, Artificial Sequence
  Synthetic
tctaacagctggcatgtctg

SEQ ID NO: 1406 - DNA, 20 bp, Artificial Sequence
  Synthetic
tctaacagctggcatgtctg

SEQ ID NO: 1407 - DNA, 20 bp, Artificial Sequence
  Synthetic
tctaacagctggcatgtctg

SEQ ID NO: 1408 - DNA, 20 bp, Artificial Sequence
  Synthetic
tctaacagctggcatgtctg

SEQ ID NO: 1409 - DNA, 20 bp, Artificial Sequence
  Synthetic
tctaacagctggcatgtctg

SEQ ID NO: 1410 - DNA, 20 bp, Artificial Sequence
  Synthetic
tctaacagctggcatgtctg

SEQ ID NO: 1411 - DNA, 20 bp, Artificial Sequence
  Synthetic
tctaacagctggcatgtctg

SEQ ID NO: 1412 - DNA, 20 bp, Artificial Sequence
  Synthetic
tctaacagctggcatgtctg

SEQ ID NO: 1413 - DNA, 20 bp, Artificial Sequence
  Synthetic
tctaacagctggcatgtctg

SEQ ID NO: 1414 - DNA, 20 bp, Artificial Sequence
  Synthetic
tctaacagctggcatgtctg

SEQ ID NO: 1415 - DNA, 20 bp, Artificial Sequence
  Synthetic
tctaacagctggcatgtctg

SEQ ID NO: 1416 - DNA, 20 bp, Artificial Sequence
  Synthetic
tctaacagctggcatgtctg

SEQ ID NO: 1417 - DNA, 20 bp, Artificial Sequence
  Synthetic
catcagtctggagctaggca

SEQ ID NO: 1418 - DNA, 20 bp, Artificial Sequence
  Synthetic
catcagtctggagctaggca

SEQ ID NO: 1419 - DNA, 20 bp, Artificial Sequence
  Synthetic
catcagtctggagctaggca

SEQ ID NO: 1420 - DNA, 20 bp, Artificial Sequence
  Synthetic
catcagtctggagctaggca

SEQ ID NO: 1421 - DNA, 20 bp, Artificial Sequence
  Synthetic
catcagtctggagctaggca

SEQ ID NO: 1422 - DNA, 20 bp, Artificial Sequence
  Synthetic
catcagtctggagctaggca

SEQ ID NO: 1423 - DNA, 20 bp, Artificial Sequence
  Synthetic
catcagtctggagctaggca

SEQ ID NO: 1424 - DNA, 20 bp, Artificial Sequence
  Synthetic
catcagtctggagctaggca

SEQ ID NO: 1425 - DNA, 20 bp, Artificial Sequence
  Synthetic
catcagtctggagctaggca

SEQ ID NO: 1426 - DNA, 20 bp, Artificial Sequence
  Synthetic
catcagtctggagctaggca

SEQ ID NO: 1427 - DNA, 20 bp, Artificial Sequence
  Synthetic
catcagtctggagctaggca

SEQ ID NO: 1428 - DNA, 20 bp, Artificial Sequence
  Synthetic
catcagtctggagctaggca

SEQ ID NO: 1429 - DNA, 20 bp, Artificial Sequence
  Synthetic
catcagtctggagctaggca

SEQ ID NO: 1430 - DNA, 20 bp, Artificial Sequence
  Synthetic
catcagtctggagctaggca

SEQ ID NO: 1431 - DNA, 20 bp, Artificial Sequence
  Synthetic
catcagtctggagctaggca

SEQ ID NO: 1432 - DNA, 20 bp, Artificial Sequence
  Synthetic
catcagtctggagctaggca

SEQ ID NO: 1433 - DNA, 20 bp, Artificial Sequence
  Synthetic
aagctctccagatccccttg

SEQ ID NO: 1434 - DNA, 20 bp, Artificial Sequence
  Synthetic
aagctctccagatccccttg

SEQ ID NO: 1435 - DNA, 20 bp, Artificial Sequence
  Synthetic
aagctctccagatccccttg

SEQ ID NO: 1436 - DNA, 20 bp, Artificial Sequence
  Synthetic
aagctctccagatccccttg

SEQ ID NO: 1437 - DNA, 20 bp, Artificial Sequence
  Synthetic
aagctctccagatccccttg

SEQ ID NO: 1438 - DNA, 20 bp, Artificial Sequence
  Synthetic
aagctctccagatccccttg

SEQ ID NO: 1439 - DNA, 20 bp, Artificial Sequence
  Synthetic
aagctctccagatccccttg

SEQ ID NO: 1440 - DNA, 20 bp, Artificial Sequence
  Synthetic
aagctctccagatccccttg

SEQ ID NO: 1441 - DNA, 20 bp, Artificial Sequence
  Synthetic
aagctctccagatccccttg

SEQ ID NO: 1442 - DNA, 20 bp, Artificial Sequence
  Synthetic
aagctctccagatccccttg

SEQ ID NO: 1443 - DNA, 20 bp, Artificial Sequence
  Synthetic
aagctctccagatccccttg

SEQ ID NO: 1444 - DNA, 20 bp, Artificial Sequence
  Synthetic
aagctctccagatccccttg

SEQ ID NO: 1445 - DNA, 20 bp, Artificial Sequence
  Synthetic
aagctctccagatccccttg

SEQ ID NO: 1446 - DNA, 20 bp, Artificial Sequence
  Synthetic
aagctctccagatccccttg

SEQ ID NO: 1447 - DNA, 20 bp, Artificial Sequence
  Synthetic
aagctctccagatccccttg

SEQ ID NO: 1448 - DNA, 20 bp, Artificial Sequence
  Synthetic
aagctctccagatccccttg

SEQ ID NO: 1449 - DNA, 20 bp, Artificial Sequence
  Synthetic
aagctctccagatccccttg

SEQ ID NO: 1450 - DNA, 20 bp, Artificial Sequence
  Synthetic
aagctctccagatccccttg

SEQ ID NO: 1451 - DNA, 20 bp, Artificial Sequence
  Synthetic
aagctctccagatccccttg

SEQ ID NO: 1452 - DNA, 20 bp, Artificial Sequence
  Synthetic
aagctctccagatccccttg

SEQ ID NO: 1453 - DNA, 20 bp, Artificial Sequence
  Synthetic
aagctctccagatccccttg

SEQ ID NO: 1454 - DNA, 20 bp, Artificial Sequence
  Synthetic
aagctctccagatccccttg

SEQ ID NO: 1455 - DNA, 20 bp, Artificial Sequence
  Synthetic
aagctctccagatccccttg

SEQ ID NO: 1456 - DNA, 20 bp, Artificial Sequence
  Synthetic
aagctctccagatccccttg

SEQ ID NO: 1457 - DNA, 20 bp, Artificial Sequence
  Synthetic
agaccagacttgttgcccaa

SEQ ID NO: 1458 - DNA, 20 bp, Artificial Sequence
  Synthetic
agaccagacttgttgcccaa

SEQ ID NO: 1459 - DNA, 20 bp, Artificial Sequence
  Synthetic
agaccagacttgttgcccaa

SEQ ID NO: 1460 - DNA, 20 bp, Artificial Sequence
  Synthetic
agaccagacttgttgcccaa

SEQ ID NO: 1461 - DNA, 20 bp, Artificial Sequence
  Synthetic
agaccagacttgttgcccaa

SEQ ID NO: 1462 - DNA, 20 bp, Artificial Sequence
  Synthetic
agaccagacttgttgcccaa

SEQ ID NO: 1463 - DNA, 20 bp, Artificial Sequence
  Synthetic
agaccagacttgttgcccaa

SEQ ID NO: 1464 - DNA, 20 bp, Artificial Sequence
  Synthetic
agaccagacttgttgcccaa

SEQ ID NO: 1465 - DNA, 20 bp, Artificial Sequence
  Synthetic
agaccagacttgttgcccaa

SEQ ID NO: 1466 - DNA, 20 bp, Artificial Sequence
  Synthetic
agaccagacttgttgcccaa

SEQ ID NO: 1467 - DNA, 20 bp, Artificial Sequence
  Synthetic
agaccagacttgttgcccaa

SEQ ID NO: 1468 - DNA, 20 bp, Artificial Sequence
  Synthetic
agaccagacttgttgcccaa

SEQ ID NO: 1469 - DNA, 20 bp, Artificial Sequence
  Synthetic
agaccagacttgttgcccaa

SEQ ID NO: 1470 - DNA, 20 bp, Artificial Sequence
  Synthetic
agaccagacttgttgcccaa

SEQ ID NO: 1471 - DNA, 20 bp, Artificial Sequence
  Synthetic
agaccagacttgttgcccaa

SEQ ID NO: 1472 - DNA, 20 bp, Artificial Sequence
  Synthetic
agaccagacttgttgcccaa

SEQ ID NO: 1473 - DNA, 19 bp, Artificial Sequence
  Synthetic
gggcgcagtcttcagcatt

SEQ ID NO: 1474 - DNA, 19 bp, Artificial Sequence
  Synthetic
gggcgcagtcttcagcatt

SEQ ID NO: 1475 - DNA, 19 bp, Artificial Sequence
  Synthetic
gggcgcagtcttcagcatt

SEQ ID NO: 1476 - DNA, 19 bp, Artificial Sequence
  Synthetic
gggcgcagtcttcagcatt

SEQ ID NO: 1477 - DNA, 19 bp, Artificial Sequence
  Synthetic
gggcgcagtcttcagcatt

SEQ ID NO: 1478 - DNA, 19 bp, Artificial Sequence
  Synthetic
gggcgcagtcttcagcatt

SEQ ID NO: 1479 - DNA, 19 bp, Artificial Sequence
  Synthetic
gggcgcagtcttcagcatt

SEQ ID NO: 1480 - DNA, 19 bp, Artificial Sequence
  Synthetic
gggcgcagtcttcagcatt

SEQ ID NO: 1481 - DNA, 19 bp, Artificial Sequence
  Synthetic
gggcgcagtcttcagcatt

SEQ ID NO: 1482 - DNA, 19 bp, Artificial Sequence
  Synthetic
gggcgcagtcttcagcatt

SEQ ID NO: 1483 - DNA, 20 bp, Artificial Sequence
  Synthetic
gtcctcaacccctggcatcc

SEQ ID NO: 1484 - DNA, 20 bp, Artificial Sequence
  Synthetic
gtcctcaacccctggcatcc

SEQ ID NO: 1485 - DNA, 20 bp, Artificial Sequence
  Synthetic
gtcctcaacccctggcatcc

SEQ ID NO: 1486 - DNA, 20 bp, Artificial Sequence
  Synthetic
gtcctcaacccctggcatcc

SEQ ID NO: 1487 - DNA, 20 bp, Artificial Sequence
  Synthetic
gtcctcaacccctggcatcc

SEQ ID NO: 1488 - DNA, 20 bp, Artificial Sequence
  Synthetic
gtcctcaacccctggcatcc

SEQ ID NO: 1489 - DNA, 20 bp, Artificial Sequence
  Synthetic
gtcctcaacccctggcatcc

SEQ ID NO: 1490 - DNA, 20 bp, Artificial Sequence
  Synthetic
gtcctcaacccctggcatcc

SEQ ID NO: 1491 - DNA, 20 bp, Artificial Sequence
  Synthetic
gtcctcaacccctggcatcc

SEQ ID NO: 1492 - DNA, 20 bp, Artificial Sequence
  Synthetic
gtcctcaacccctggcatcc

SEQ ID NO: 1493 - DNA, 20 bp, Artificial Sequence
  Synthetic
gtcctcaacccctggcatcc

SEQ ID NO: 1494 - DNA, 20 bp, Artificial Sequence
  Synthetic
gtcctcaacccctggcatcc

SEQ ID NO: 1495 - DNA, 20 bp, Artificial Sequence
  Synthetic
gtcctcaacccctggcatcc

SEQ ID NO: 1496 - DNA, 20 bp, Artificial Sequence
  Synthetic
gtcctcaacccctggcatcc

SEQ ID NO: 1497 - DNA, 18 bp, Artificial Sequence
  Synthetic
agcatgtgcctgtagttc

SEQ ID NO: 1498 - DNA, 18 bp, Artificial Sequence
  Synthetic
agcatgtgcctgtagttc

SEQ ID NO: 1499 - DNA, 18 bp, Artificial Sequence
  Synthetic
agcatgtgcctgtagttc

SEQ ID NO: 1500 - DNA, 18 bp, Artificial Sequence
  Synthetic
agcatgtgcctgtagttc

SEQ ID NO: 1501 - DNA, 18 bp, Artificial Sequence
  Synthetic
agcatgtgcctgtagttc

SEQ ID NO: 1502 - DNA, 18 bp, Artificial Sequence
  Synthetic
agcatgtgcctgtagttc

SEQ ID NO: 1503 - DNA, 18 bp, Artificial Sequence
  Synthetic
agcatgtgcctgtagttc

SEQ ID NO: 1504 - DNA, 18 bp, Artificial Sequence
  Synthetic
agcatgtgcctgtagttc

SEQ ID NO: 1505 - DNA, 18 bp, Artificial Sequence
  Synthetic
agcatgtgcctgtagttc

SEQ ID NO: 1506 - DNA, 18 bp, Artificial Sequence
  Synthetic
agcatgtgcctgtagttc

SEQ ID NO: 1507 - DNA, 18 bp, Artificial Sequence
  Synthetic
agcatgtgcctgtagttc

SEQ ID NO: 1508 - DNA, 18 bp, Artificial Sequence
  Synthetic
agcatgtgcctgtagttc

SEQ ID NO: 1509 - DNA, 18 bp, Artificial Sequence
  Synthetic
agcatgtgcctgtagttc

SEQ ID NO: 1510 - DNA, 18 bp, Artificial Sequence
  Synthetic
agcatgtgcctgtagttc

SEQ ID NO: 1511 - DNA, 18 bp, Artificial Sequence
  Synthetic
agcatgtgcctgtagttc

SEQ ID NO: 1512 - DNA, 18 bp, Artificial Sequence
  Synthetic
agcatgtgcctgtagttc

SEQ ID NO: 1513 - DNA, 20 bp, Artificial Sequence
  Synthetic
tctaacagctggcatgtctg

SEQ ID NO: 1514 - DNA, 20 bp, Artificial Sequence
  Synthetic
tctaacagctggcatgtctg

SEQ ID NO: 1515 - DNA, 20 bp, Artificial Sequence
  Synthetic
tctaacagctggcatgtctg

SEQ ID NO: 1516 - DNA, 20 bp, Artificial Sequence
  Synthetic
tctaacagctggcatgtctg

SEQ ID NO: 1517 - DNA, 20 bp, Artificial Sequence
  Synthetic
tctaacagctggcatgtctg

SEQ ID NO: 1518 - DNA, 20 bp, Artificial Sequence
  Synthetic
catcagtctggagctaggca

SEQ ID NO: 1519 - DNA, 20 bp, Artificial Sequence
  Synthetic
catcagtctggagctaggca

SEQ ID NO: 1520 - DNA, 20 bp, Artificial Sequence
  Synthetic
catcagtctggagctaggca

SEQ ID NO: 1521 - DNA, 20 bp, Artificial Sequence
  Synthetic
gaccaactgtgtgacctcct

SEQ ID NO: 1522 - DNA, 20 bp, Artificial Sequence
  Synthetic
gaccaactgtgtgacctcct

SEQ ID NO: 1523 - DNA, 20 bp, Artificial Sequence
  Synthetic
gaccaactgtgtgacctcct

SEQ ID NO: 1524 - DNA, 20 bp, Artificial Sequence
  Synthetic
gaccaactgtgtgacctcct

SEQ ID NO: 1525 - DNA, 20 bp, Artificial Sequence
  Synthetic
gaccaactgtgtgacctcct

SEQ ID NO: 1526 - DNA, 20 bp, Artificial Sequence
  Synthetic
gaccaactgtgtgacctcct

SEQ ID NO: 1527 - DNA, 20 bp, Artificial Sequence
  Synthetic
gaccaactgtgtgacctcct

SEQ ID NO: 1528 - DNA, 20 bp, Artificial Sequence
  Synthetic
gaccaactgtgtgacctcct

SEQ ID NO: 1529 - DNA, 20 bp, Artificial Sequence
  Synthetic
aagctctccagatccccttg

SEQ ID NO: 1530 - DNA, 20 bp, Artificial Sequence
  Synthetic
aagctctccagatccccttg

SEQ ID NO: 1531 - DNA, 20 bp, Artificial Sequence
  Synthetic
aagctctccagatccccttg

SEQ ID NO: 1532 - DNA, 20 bp, Artificial Sequence
  Synthetic
aagctctccagatccccttg

SEQ ID NO: 1533 - DNA, 20 bp, Artificial Sequence
  Synthetic
aagctctccagatccccttg

SEQ ID NO: 1534 - DNA, 20 bp, Artificial Sequence
  Synthetic
agaccagacttgttgcccaa

SEQ ID NO: 1535 - DNA, 20 bp, Artificial Sequence
  Synthetic
agaccagacttgttgcccaa

SEQ ID NO: 1536 - DNA, 20 bp, Artificial Sequence
  Synthetic
agaccagacttgttgcccaa

SEQ ID NO: 1537 - DNA, 20 bp, Artificial Sequence
  Synthetic
tctgaacactcaccgctttg

SEQ ID NO: 1538 - DNA, 20 bp, Artificial Sequence
  Synthetic
tctgaacactcaccgctttg

SEQ ID NO: 1539 - DNA, 20 bp, Artificial Sequence
  Synthetic
tctgaacactcaccgctttg

SEQ ID NO: 1540 - DNA, 20 bp, Artificial Sequence
  Synthetic
tctgaacactcaccgctttg

SEQ ID NO: 1541 - DNA, 20 bp, Artificial Sequence
  Synthetic
tctgaacactcaccgctttg

SEQ ID NO: 1542 - DNA, 20 bp, Artificial Sequence
  Synthetic
tctgaacactcaccgctttg

SEQ ID NO: 1543 - DNA, 20 bp, Artificial Sequence
  Synthetic
tctgaacactcaccgctttg

SEQ ID NO: 1544 - DNA, 20 bp, Artificial Sequence
  Synthetic
tctgaacactcaccgctttg

SEQ ID NO: 1545 - DNA, 20 bp, Artificial Sequence
  Synthetic
tctaacagctggcatgtctg

SEQ ID NO: 1546 - DNA, 20 bp, Artificial Sequence
  Synthetic
tctaacagctggcatgtctg

SEQ ID NO: 1547 - DNA, 20 bp, Artificial Sequence
  Synthetic
tctaacagctggcatgtctg

SEQ ID NO: 1548 - DNA, 20 bp, Artificial Sequence
  Synthetic
tctaacagctggcatgtctg

SEQ ID NO: 1549 - DNA, 20 bp, Artificial Sequence
  Synthetic
tctaacagctggcatgtctg

SEQ ID NO: 1550 - DNA, 20 bp, Artificial Sequence
  Synthetic
catcagtctggagctaggca

SEQ ID NO: 1551 - DNA, 20 bp, Artificial Sequence
  Synthetic
catcagtctggagctaggca

SEQ ID NO: 1552 - DNA, 20 bp, Artificial Sequence
  Synthetic
catcagtctggagctaggca

SEQ ID NO: 1553 - DNA, 20 bp, Artificial Sequence
  Synthetic
gaccaactgtgtgacctcct

SEQ ID NO: 1554 - DNA, 20 bp, Artificial Sequence
  Synthetic
gaccaactgtgtgacctcct

SEQ ID NO: 1555 - DNA, 20 bp, Artificial Sequence
  Synthetic
gaccaactgtgtgacctcct

SEQ ID NO: 1556 - DNA, 20 bp, Artificial Sequence
  Synthetic
gaccaactgtgtgacctcct

SEQ ID NO: 1557 - DNA, 20 bp, Artificial Sequence
  Synthetic
gaccaactgtgtgacctcct

SEQ ID NO: 1558 - DNA, 20 bp, Artificial Sequence
  Synthetic
gaccaactgtgtgacctcct

SEQ ID NO: 1559 - DNA, 20 bp, Artificial Sequence
  Synthetic
gaccaactgtgtgacctcct

SEQ ID NO: 1560 - DNA, 20 bp, Artificial Sequence
  Synthetic
gaccaactgtgtgacctcct

SEQ ID NO: 1561 - DNA, 20 bp, Artificial Sequence
  Synthetic
aagctctccagatccccttg

SEQ ID NO: 1562 - DNA, 20 bp, Artificial Sequence
  Synthetic
aagctctccagatccccttg

SEQ ID NO: 1563 - DNA, 20 bp, Artificial Sequence
  Synthetic
aagctctccagatccccttg

SEQ ID NO: 1564 - DNA, 20 bp, Artificial Sequence
  Synthetic
aagctctccagatccccttg

SEQ ID NO: 1565 - DNA, 20 bp, Artificial Sequence
  Synthetic
aagctctccagatccccttg

SEQ ID NO: 1566 - DNA, 20 bp, Artificial Sequence
  Synthetic
agaccagacttgttgcccaa

SEQ ID NO: 1567 - DNA, 20 bp, Artificial Sequence
  Synthetic
agaccagacttgttgcccaa

SEQ ID NO: 1568 - DNA, 20 bp, Artificial Sequence
  Synthetic
agaccagacttgttgcccaa

SEQ ID NO: 1569 - DNA, 20 bp, Artificial Sequence
  Synthetic
tctgaacactcaccgctttg

SEQ ID NO: 1570 - DNA, 20 bp, Artificial Sequence
  Synthetic
tctgaacactcaccgctttg

SEQ ID NO: 1571 - DNA, 20 bp, Artificial Sequence
  Synthetic
tctgaacactcaccgctttg

SEQ ID NO: 1572 - DNA, 20 bp, Artificial Sequence
  Synthetic
tctgaacactcaccgctttg

SEQ ID NO: 1573 - DNA, 20 bp, Artificial Sequence
  Synthetic
tctgaacactcaccgctttg

SEQ ID NO: 1574 - DNA, 20 bp, Artificial Sequence
  Synthetic
tctgaacactcaccgctttg

SEQ ID NO: 1575 - DNA, 20 bp, Artificial Sequence
  Synthetic
tctgaacactcaccgctttg

SEQ ID NO: 1576 - DNA, 20 bp, Artificial Sequence
  Synthetic
tctgaacactcaccgctttg

SEQ ID NO: 1577 - DNA, 21 bp, Artificial Sequence
  Synthetic
cactacgctccggcagtcacc

SEQ ID NO: 1578 - DNA, 21 bp, Artificial Sequence
  Synthetic
cactacgctccggcagtcacc

SEQ ID NO: 1579 - DNA, 21 bp, Artificial Sequence
  Synthetic
cactacgctccggcagtcacc

SEQ ID NO: 1580 - DNA, 21 bp, Artificial Sequence
  Synthetic
cactacgctccggcagtcacc

SEQ ID NO: 1581 - DNA, 21 bp, Artificial Sequence
  Synthetic
cactacgctccggcagtcacc

SEQ ID NO: 1582 - DNA, 20 bp, Artificial Sequence
  Synthetic
acctacaaggtatgctctgc

SEQ ID NO: 1583 - DNA, 20 bp, Artificial Sequence
  Synthetic
acctacaaggtatgctctgc

SEQ ID NO: 1584 - DNA, 20 bp, Artificial Sequence
  Synthetic
acctacaaggtatgctctgc

SEQ ID NO: 1585 - DNA, 20 bp, Artificial Sequence
  Synthetic
acctacaaggtatgctctgc

SEQ ID NO: 1586 - DNA, 20 bp, Artificial Sequence
  Synthetic
acctacaaggtatgctctgc

SEQ ID NO: 1587 - DNA, 20 bp, Artificial Sequence
  Synthetic
acctacaaggtatgctctgc

SEQ ID NO: 1588 - DNA, 20 bp, Artificial Sequence
  Synthetic
acctacaaggtatgctctgc

SEQ ID NO: 1589 - DNA, 20 bp, Artificial Sequence
  Synthetic
acctacaaggtatgctctgc

SEQ ID NO: 1590 - DNA, 20 bp, Artificial Sequence
  Synthetic
ccctgccccttgttactttc

SEQ ID NO: 1591 - DNA, 20 bp, Artificial Sequence
  Synthetic
ccctgccccttgttactttc

SEQ ID NO: 1592 - DNA, 20 bp, Artificial Sequence
  Synthetic
ccctgccccttgttactttc

SEQ ID NO: 1593 - DNA, 20 bp, Artificial Sequence
  Synthetic
ccctgccccttgttactttc

SEQ ID NO: 1594 - DNA, 20 bp, Artificial Sequence
  Synthetic
ccctgccccttgttactttc

SEQ ID NO: 1595 - DNA, 20 bp, Artificial Sequence
  Synthetic
ccctgccccttgttactttc

SEQ ID NO: 1596 - DNA, 20 bp, Artificial Sequence
  Synthetic
ccctgccccttgttactttc

SEQ ID NO: 1597 - DNA, 20 bp, Artificial Sequence
  Synthetic
ccctgccccttgttactttc

SEQ ID NO: 1598 - DNA, 20 bp, Artificial Sequence
  Synthetic
ccctgccccttgttactttc

SEQ ID NO: 1599 - DNA, 20 bp, Artificial Sequence
  Synthetic
ccctgccccttgttactttc

SEQ ID NO: 1600 - DNA, 20 bp, Artificial Sequence
  Synthetic
ccctgccccttgttactttc

SEQ ID NO: 1601 - DNA, 20 bp, Artificial Sequence
  Synthetic
ccctgccccttgttactttc

SEQ ID NO: 1602 - DNA, 20 bp, Artificial Sequence
  Synthetic
ccctgccccttgttactttc

SEQ ID NO: 1603 - DNA, 20 bp, Artificial Sequence
  Synthetic
ccctgccccttgttactttc

SEQ ID NO: 1604 - DNA, 20 bp, Artificial Sequence
  Synthetic
ccctgccccttgttactttc

SEQ ID NO: 1605 - DNA, 20 bp, Artificial Sequence
  Synthetic
ccctgccccttgttactttc

SEQ ID NO: 1606 - DNA, 20 bp, Artificial Sequence
  Synthetic
ccctgccccttgttactttc

SEQ ID NO: 1607 - DNA, 20 bp, Artificial Sequence
  Synthetic
ccctgccccttgttactttc

SEQ ID NO: 1608 - DNA, 20 bp, Artificial Sequence
  Synthetic
ccctgccccttgttactttc

SEQ ID NO: 1609 - DNA, 20 bp, Artificial Sequence
  Synthetic
ccctgccccttgttactttc

SEQ ID NO: 1610 - DNA, 20 bp, Artificial Sequence
  Synthetic
ccctgccccttgttactttc

SEQ ID NO: 1611 - DNA, 20 bp, Artificial Sequence
  Synthetic
ccctgccccttgttactttc

SEQ ID NO: 1612 - DNA, 20 bp, Artificial Sequence
  Synthetic
ccctgccccttgttactttc

SEQ ID NO: 1613 - DNA, 20 bp, Artificial Sequence
  Synthetic
ccctgccccttgttactttc

SEQ ID NO: 1614 - DNA, 20 bp, Artificial Sequence
  Synthetic
ccctgccccttgttactttc

SEQ ID NO: 1615 - DNA, 20 bp, Artificial Sequence
  Synthetic
ccctgccccttgttactttc

SEQ ID NO: 1616 - DNA, 20 bp, Artificial Sequence
  Synthetic
ccctgccccttgttactttc

SEQ ID NO: 1617 - DNA, 20 bp, Artificial Sequence
  Synthetic
ccctgccccttgttactttc

SEQ ID NO: 1618 - DNA, 20 bp, Artificial Sequence
  Synthetic
ccctgccccttgttactttc

SEQ ID NO: 1619 - DNA, 20 bp, Artificial Sequence
  Synthetic
ccctgccccttgttactttc

SEQ ID NO: 1620 - DNA, 20 bp, Artificial Sequence
  Synthetic
ccctgccccttgttactttc

SEQ ID NO: 1621 - DNA, 20 bp, Artificial Sequence
  Synthetic
ccctgccccttgttactttc

SEQ ID NO: 1622 - DNA, 20 bp, Artificial Sequence
  Synthetic
ccctgccccttgttactttc

SEQ ID NO: 1623 - DNA, 20 bp, Artificial Sequence
  Synthetic
ccctgccccttgttactttc

SEQ ID NO: 1624 - DNA, 20 bp, Artificial Sequence
  Synthetic
ccctgccccttgttactttc

SEQ ID NO: 1625 - DNA, 20 bp, Artificial Sequence
  Synthetic
ccctgccccttgttactttc

SEQ ID NO: 1626 - DNA, 20 bp, Artificial Sequence
  Synthetic
ccctgccccttgttactttc

SEQ ID NO: 1627 - DNA, 20 bp, Artificial Sequence
  Synthetic
ccctgccccttgttactttc

SEQ ID NO: 1628 - DNA, 20 bp, Artificial Sequence
  Synthetic
ccctgccccttgttactttc

SEQ ID NO: 1629 - DNA, 20 bp, Artificial Sequence
  Synthetic
ccctgccccttgttactttc

SEQ ID NO: 1630 - DNA, 20 bp, Artificial Sequence
  Synthetic
ccctgccccttgttactttc

SEQ ID NO: 1631 - DNA, 21 bp, Artificial Sequence
  Synthetic
ctcatttggaaagtgggcatt

SEQ ID NO: 1632 - DNA, 21 bp, Artificial Sequence
  Synthetic
ctcatttggaaagtgggcatt

SEQ ID NO: 1633 - DNA, 21 bp, Artificial Sequence
  Synthetic
ctcatttggaaagtgggcatt

SEQ ID NO: 1634 - DNA, 21 bp, Artificial Sequence
  Synthetic
ctcatttggaaagtgggcatt

SEQ ID NO: 1635 - DNA, 21 bp, Artificial Sequence
  Synthetic
ctcatttggaaagtgggcatt

SEQ ID NO: 1636 - DNA, 21 bp, Artificial Sequence
  Synthetic
ctcatttggaaagtgggcatt

SEQ ID NO: 1637 - DNA, 21 bp, Artificial Sequence
  Synthetic
ctcatttggaaagtgggcatt

SEQ ID NO: 1638 - DNA, 21 bp, Artificial Sequence
  Synthetic
ctcatttggaaagtgggcatt

SEQ ID NO: 1639 - DNA, 21 bp, Artificial Sequence
  Synthetic
ctcatttggaaagtgggcatt

SEQ ID NO: 1640 - DNA, 21 bp, Artificial Sequence
  Synthetic
ctcatttggaaagtgggcatt

SEQ ID NO: 1641 - DNA, 21 bp, Artificial Sequence
  Synthetic
ctcatttggaaagtgggcatt

SEQ ID NO: 1642 - DNA, 21 bp, Artificial Sequence
  Synthetic
ctcatttggaaagtgggcatt

SEQ ID NO: 1643 - DNA, 21 bp, Artificial Sequence
  Synthetic
ctcatttggaaagtgggcatt

SEQ ID NO: 1644 - DNA, 21 bp, Artificial Sequence
  Synthetic
ctcatttggaaagtgggcatt

SEQ ID NO: 1645 - DNA, 21 bp, Artificial Sequence
  Synthetic
ctcatttggaaagtgggcatt

SEQ ID NO: 1646 - DNA, 21 bp, Artificial Sequence
  Synthetic
ctcatttggaaagtgggcatt

SEQ ID NO: 1647 - DNA, 21 bp, Artificial Sequence
  Synthetic
ctcatttggaaagtgggcatt

SEQ ID NO: 1648 - DNA, 21 bp, Artificial Sequence
  Synthetic
ctcatttggaaagtgggcatt

SEQ ID NO: 1649 - DNA, 21 bp, Artificial Sequence
  Synthetic
ctcatttggaaagtgggcatt

SEQ ID NO: 1650 - DNA, 21 bp, Artificial Sequence
  Synthetic
ctcatttggaaagtgggcatt

SEQ ID NO: 1651 - DNA, 21 bp, Artificial Sequence
  Synthetic
ctcatttggaaagtgggcatt

SEQ ID NO: 1652 - DNA, 21 bp, Artificial Sequence
  Synthetic
ctcatttggaaagtgggcatt

SEQ ID NO: 1653 - DNA, 21 bp, Artificial Sequence
  Synthetic
ctcatttggaaagtgggcatt

SEQ ID NO: 1654 - DNA, 21 bp, Artificial Sequence
  Synthetic
ctcatttggaaagtgggcatt

SEQ ID NO: 1655 - DNA, 21 bp, Artificial Sequence
  Synthetic
ctcatttggaaagtgggcatt

SEQ ID NO: 1656 - DNA, 21 bp, Artificial Sequence
  Synthetic
ctcatttggaaagtgggcatt

SEQ ID NO: 1657 - DNA, 21 bp, Artificial Sequence
  Synthetic
ctcatttggaaagtgggcatt

SEQ ID NO: 1658 - DNA, 21 bp, Artificial Sequence
  Synthetic
ctcatttggaaagtgggcatt

SEQ ID NO: 1659 - DNA, 21 bp, Artificial Sequence
  Synthetic
ctcatttggaaagtgggcatt

SEQ ID NO: 1660 - DNA, 21 bp, Artificial Sequence
  Synthetic
ctcatttggaaagtgggcatt

SEQ ID NO: 1661 - DNA, 21 bp, Artificial Sequence
  Synthetic
ctcatttggaaagtgggcatt

SEQ ID NO: 1662 - DNA, 21 bp, Artificial Sequence
  Synthetic
ctcatttggaaagtgggcatt

SEQ ID NO: 1663 - DNA, 20 bp, Artificial Sequence
  Synthetic
gaccctttgctcctttcaca

SEQ ID NO: 1664 - DNA, 20 bp, Artificial Sequence
  Synthetic
gaccctttgctcctttcaca

SEQ ID NO: 1665 - DNA, 20 bp, Artificial Sequence
  Synthetic
gaccctttgctcctttcaca

SEQ ID NO: 1666 - DNA, 20 bp, Artificial Sequence
  Synthetic
gaccctttgctcctttcaca

SEQ ID NO: 1667 - DNA, 20 bp, Artificial Sequence
  Synthetic
gaccctttgctcctttcaca

SEQ ID NO: 1668 - DNA, 20 bp, Artificial Sequence
  Synthetic
gaccctttgctcctttcaca

SEQ ID NO: 1669 - DNA, 20 bp, Artificial Sequence
  Synthetic
gaccctttgctcctttcaca

SEQ ID NO: 1670 - DNA, 20 bp, Artificial Sequence
  Synthetic
gaccctttgctcctttcaca

SEQ ID NO: 1671 - DNA, 20 bp, Artificial Sequence
  Synthetic
gaccctttgctcctttcaca

SEQ ID NO: 1672 - DNA, 20 bp, Artificial Sequence
  Synthetic
gaccctttgctcctttcaca

SEQ ID NO: 1673 - DNA, 20 bp, Artificial Sequence
  Synthetic
gaccctttgctcctttcaca

SEQ ID NO: 1674 - DNA, 20 bp, Artificial Sequence
  Synthetic
gaccctttgctcctttcaca

SEQ ID NO: 1675 - DNA, 20 bp, Artificial Sequence
  Synthetic
gaccctttgctcctttcaca

SEQ ID NO: 1676 - DNA, 20 bp, Artificial Sequence
  Synthetic
gaccctttgctcctttcaca

SEQ ID NO: 1677 - DNA, 20 bp, Artificial Sequence
  Synthetic
gaccctttgctcctttcaca

SEQ ID NO: 1678 - DNA, 20 bp, Artificial Sequence
  Synthetic
gaccctttgctcctttcaca

SEQ ID NO: 1679 - DNA, 20 bp, Artificial Sequence
  Synthetic
gaccctttgctcctttcaca

SEQ ID NO: 1680 - DNA, 20 bp, Artificial Sequence
  Synthetic
gaccctttgctcctttcaca

SEQ ID NO: 1681 - DNA, 20 bp, Artificial Sequence
  Synthetic
gaccctttgctcctttcaca

SEQ ID NO: 1682 - DNA, 20 bp, Artificial Sequence
  Synthetic
gaccctttgctcctttcaca

SEQ ID NO: 1683 - DNA, 20 bp, Artificial Sequence
  Synthetic
gaccctttgctcctttcaca

SEQ ID NO: 1684 - DNA, 20 bp, Artificial Sequence
  Synthetic
gaccctttgctcctttcaca

SEQ ID NO: 1685 - DNA, 20 bp, Artificial Sequence
  Synthetic
gaccctttgctcctttcaca

SEQ ID NO: 1686 - DNA, 20 bp, Artificial Sequence
  Synthetic
gaccctttgctcctttcaca

SEQ ID NO: 1687 - DNA, 20 bp, Artificial Sequence
  Synthetic
gaccctttgctcctttcaca

SEQ ID NO: 1688 - DNA, 20 bp, Artificial Sequence
  Synthetic
gaccctttgctcctttcaca

SEQ ID NO: 1689 - DNA, 20 bp, Artificial Sequence
  Synthetic
gaccctttgctcctttcaca

SEQ ID NO: 1690 - DNA, 21 bp, Artificial Sequence
  Synthetic
gagagctggagttcatgaagg

SEQ ID NO: 1691 - DNA, 21 bp, Artificial Sequence
  Synthetic
gagagctggagttcatgaagg

SEQ ID NO: 1692 - DNA, 21 bp, Artificial Sequence
  Synthetic
gagagctggagttcatgaagg

SEQ ID NO: 1693 - DNA, 21 bp, Artificial Sequence
  Synthetic
gagagctggagttcatgaagg

SEQ ID NO: 1694 - DNA, 21 bp, Artificial Sequence
  Synthetic
gagagctggagttcatgaagg

SEQ ID NO: 1695 - DNA, 21 bp, Artificial Sequence
  Synthetic
gagagctggagttcatgaagg

SEQ ID NO: 1696 - DNA, 21 bp, Artificial Sequence
  Synthetic
gagagctggagttcatgaagg

SEQ ID NO: 1697 - DNA, 21 bp, Artificial Sequence
  Synthetic
gagagctggagttcatgaagg

SEQ ID NO: 1698 - DNA, 21 bp, Artificial Sequence
  Synthetic
gagagctggagttcatgaagg

SEQ ID NO: 1699 - DNA, 21 bp, Artificial Sequence
  Synthetic
gagagctggagttcatgaagg

SEQ ID NO: 1700 - DNA, 21 bp, Artificial Sequence
  Synthetic
gagagctggagttcatgaagg

SEQ ID NO: 1701 - DNA, 21 bp, Artificial Sequence
  Synthetic
gagagctggagttcatgaagg

SEQ ID NO: 1702 - DNA, 21 bp, Artificial Sequence
  Synthetic
gagagctggagttcatgaagg

SEQ ID NO: 1703 - DNA, 21 bp, Artificial Sequence
  Synthetic
gagagctggagttcatgaagg

SEQ ID NO: 1704 - DNA, 21 bp, Artificial Sequence
  Synthetic
gagagctggagttcatgaagg

SEQ ID NO: 1705 - DNA, 21 bp, Artificial Sequence
  Synthetic
gagagctggagttcatgaagg

SEQ ID NO: 1706 - DNA, 21 bp, Artificial Sequence
  Synthetic
gagagctggagttcatgaagg

SEQ ID NO: 1707 - DNA, 21 bp, Artificial Sequence
  Synthetic
gagagctggagttcatgaagg

SEQ ID NO: 1708 - DNA, 21 bp, Artificial Sequence
  Synthetic
gagagctggagttcatgaagg

SEQ ID NO: 1709 - DNA, 21 bp, Artificial Sequence
  Synthetic
gagagctggagttcatgaagg

SEQ ID NO: 1710 - DNA, 21 bp, Artificial Sequence
  Synthetic
gagagctggagttcatgaagg

SEQ ID NO: 1711 - DNA, 21 bp, Artificial Sequence
  Synthetic
gagagctggagttcatgaagg

SEQ ID NO: 1712 - DNA, 21 bp, Artificial Sequence
  Synthetic
gagagctggagttcatgaagg

SEQ ID NO: 1713 - DNA, 20 bp, Artificial Sequence
  Synthetic
ggtgctgttcccatgctttg

SEQ ID NO: 1714 - DNA, 20 bp, Artificial Sequence
  Synthetic
ggtgctgttcccatgctttg

SEQ ID NO: 1715 - DNA, 20 bp, Artificial Sequence
  Synthetic
ggtgctgttcccatgctttg

SEQ ID NO: 1716 - DNA, 20 bp, Artificial Sequence
  Synthetic
ggtgctgttcccatgctttg

SEQ ID NO: 1717 - DNA, 20 bp, Artificial Sequence
  Synthetic
ggtgctgttcccatgctttg

SEQ ID NO: 1718 - DNA, 20 bp, Artificial Sequence
  Synthetic
ggtgctgttcccatgctttg

SEQ ID NO: 1719 - DNA, 20 bp, Artificial Sequence
  Synthetic
ggtgctgttcccatgctttg

SEQ ID NO: 1720 - DNA, 20 bp, Artificial Sequence
  Synthetic
ggtgctgttcccatgctttg

SEQ ID NO: 1721 - DNA, 20 bp, Artificial Sequence
  Synthetic
ggtgctgttcccatgctttg

SEQ ID NO: 1722 - DNA, 20 bp, Artificial Sequence
  Synthetic
ggtgctgttcccatgctttg

SEQ ID NO: 1723 - DNA, 20 bp, Artificial Sequence
  Synthetic
ggtgctgttcccatgctttg

SEQ ID NO: 1724 - DNA, 20 bp, Artificial Sequence
  Synthetic
ggtgctgttcccatgctttg

SEQ ID NO: 1725 - DNA, 20 bp, Artificial Sequence
  Synthetic
ggtgctgttcccatgctttg

SEQ ID NO: 1726 - DNA, 20 bp, Artificial Sequence
  Synthetic
ggtgctgttcccatgctttg

SEQ ID NO: 1727 - DNA, 20 bp, Artificial Sequence
  Synthetic
ggtgctgttcccatgctttg

SEQ ID NO: 1728 - DNA, 20 bp, Artificial Sequence
  Synthetic
ggtgctgttcccatgctttg

SEQ ID NO: 1729 - DNA, 20 bp, Artificial Sequence
  Synthetic
ggtgctgttcccatgctttg

SEQ ID NO: 1730 - DNA, 20 bp, Artificial Sequence
  Synthetic
ggtgctgttcccatgctttg

SEQ ID NO: 1731 - DNA, 20 bp, Artificial Sequence
  Synthetic
ggtgctgttcccatgctttg

SEQ ID NO: 1732 - DNA, 20 bp, Artificial Sequence
  Synthetic
ggtgctgttcccatgctttg

SEQ ID NO: 1733 - DNA, 20 bp, Artificial Sequence
  Synthetic
ggtgctgttcccatgctttg

SEQ ID NO: 1734 - DNA, 20 bp, Artificial Sequence
  Synthetic
ggtgctgttcccatgctttg

SEQ ID NO: 1735 - DNA, 20 bp, Artificial Sequence
  Synthetic
ggtgctgttcccatgctttg

SEQ ID NO: 1736 - DNA, 20 bp, Artificial Sequence
  Synthetic
ggtgctgttcccatgctttg

SEQ ID NO: 1737 - DNA, 20 bp, Artificial Sequence
  Synthetic
ggtgctgttcccatgctttg

SEQ ID NO: 1738 - DNA, 20 bp, Artificial Sequence
  Synthetic
ggtgctgttcccatgctttg

SEQ ID NO: 1739 - DNA, 20 bp, Artificial Sequence
  Synthetic
ggtgctgttcccatgctttg

SEQ ID NO: 1740 - DNA, 20 bp, Artificial Sequence
  Synthetic
ggtgctgttcccatgctttg

SEQ ID NO: 1741 - DNA, 20 bp, Artificial Sequence
  Synthetic
ggtgctgttcccatgctttg

SEQ ID NO: 1742 - DNA, 20 bp, Artificial Sequence
  Synthetic
ggtgctgttcccatgctttg

SEQ ID NO: 1743 - DNA, 20 bp, Artificial Sequence
  Synthetic
ggtgctgttcccatgctttg

SEQ ID NO: 1744 - DNA, 20 bp, Artificial Sequence
  Synthetic
ggtgctgttcccatgctttg

SEQ ID NO: 1745 - DNA, 20 bp, Artificial Sequence
  Synthetic
ggtgctgttcccatgctttg

SEQ ID NO: 1746 - DNA, 20 bp, Artificial Sequence
  Synthetic
ggtgctgttcccatgctttg

SEQ ID NO: 1747 - DNA, 20 bp, Artificial Sequence
  Synthetic
ggtgctgttcccatgctttg

SEQ ID NO: 1748 - DNA, 20 bp, Artificial Sequence
  Synthetic
ggtgctgttcccatgctttg

SEQ ID NO: 1749 - DNA, 20 bp, Artificial Sequence
  Synthetic
ggtgctgttcccatgctttg

SEQ ID NO: 1750 - DNA, 20 bp, Artificial Sequence
  Synthetic
ggtgctgttcccatgctttg

SEQ ID NO: 1751 - DNA, 20 bp, Artificial Sequence
  Synthetic
ggtgctgttcccatgctttg

SEQ ID NO: 1752 - DNA, 20 bp, Artificial Sequence
  Synthetic
ggtgctgttcccatgctttg

SEQ ID NO: 1753 - DNA, 20 bp, Artificial Sequence
  Synthetic
ggtgctgttcccatgctttg

SEQ ID NO: 1754 - DNA, 20 bp, Artificial Sequence
  Synthetic
ggtgctgttcccatgctttg

SEQ ID NO: 1755 - DNA, 20 bp, Artificial Sequence
  Synthetic
ggtgctgttcccatgctttg

SEQ ID NO: 1756 - DNA, 20 bp, Artificial Sequence
  Synthetic
ggtgctgttcccatgctttg

SEQ ID NO: 1757 - DNA, 20 bp, Artificial Sequence
  Synthetic
ggtgctgttcccatgctttg

SEQ ID NO: 1758 - DNA, 20 bp, Artificial Sequence
  Synthetic
ggtgctgttcccatgctttg

SEQ ID NO: 1759 - DNA, 20 bp, Artificial Sequence
  Synthetic
ggtgctgttcccatgctttg

SEQ ID NO: 1760 - DNA, 20 bp, Artificial Sequence
  Synthetic
ggtgctgttcccatgctttg

SEQ ID NO: 1761 - DNA, 20 bp, Artificial Sequence
  Synthetic
ggtgctgttcccatgctttg

SEQ ID NO: 1762 - DNA, 20 bp, Artificial Sequence
  Synthetic
ggtgctgttcccatgctttg

SEQ ID NO: 1763 - DNA, 20 bp, Artificial Sequence
  Synthetic
ggtgctgttcccatgctttg

SEQ ID NO: 1764 - DNA, 20 bp, Artificial Sequence
  Synthetic
ggtgctgttcccatgctttg

SEQ ID NO: 1765 - DNA, 20 bp, Artificial Sequence
  Synthetic
ggtgctgttcccatgctttg

SEQ ID NO: 1766 - DNA, 20 bp, Artificial Sequence
  Synthetic
ggtgctgttcccatgctttg

SEQ ID NO: 1767 - DNA, 20 bp, Artificial Sequence
  Synthetic
ggtgctgttcccatgctttg

SEQ ID NO: 1768 - DNA, 20 bp, Artificial Sequence
  Synthetic
ggtgctgttcccatgctttg

SEQ ID NO: 1769 - DNA, 20 bp, Artificial Sequence
  Synthetic
ggtgctgttcccatgctttg

SEQ ID NO: 1770 - DNA, 20 bp, Artificial Sequence
  Synthetic
ctggagggaagggttagctc

SEQ ID NO: 1771 - DNA, 20 bp, Artificial Sequence
  Synthetic
ctggagggaagggttagctc

SEQ ID NO: 1772 - DNA, 20 bp, Artificial Sequence
  Synthetic
ctggagggaagggttagctc

SEQ ID NO: 1773 - DNA, 20 bp, Artificial Sequence
  Synthetic
ctggagggaagggttagctc

SEQ ID NO: 1774 - DNA, 20 bp, Artificial Sequence
  Synthetic
ctggagggaagggttagctc

SEQ ID NO: 1775 - DNA, 20 bp, Artificial Sequence
  Synthetic
ttgagcgtgtgggtttcaag

SEQ ID NO: 1776 - DNA, 20 bp, Artificial Sequence
  Synthetic
ttgagcgtgtgggtttcaag

SEQ ID NO: 1777 - DNA, 20 bp, Artificial Sequence
  Synthetic
ttgagcgtgtgggtttcaag

SEQ ID NO: 1778 - DNA, 20 bp, Artificial Sequence
  Synthetic
ttgagcgtgtgggtttcaag

SEQ ID NO: 1779 - DNA, 20 bp, Artificial Sequence
  Synthetic
ttgagcgtgtgggtttcaag

SEQ ID NO: 1780 - DNA, 20 bp, Artificial Sequence
  Synthetic
ttgagcgtgtgggtttcaag

SEQ ID NO: 1781 - DNA, 20 bp, Artificial Sequence
  Synthetic
ttgagcgtgtgggtttcaag

SEQ ID NO: 1782 - DNA, 20 bp, Artificial Sequence
  Synthetic
ttgagcgtgtgggtttcaag

SEQ ID NO: 1783 - DNA, 20 bp, Artificial Sequence
  Synthetic
ttgagcgtgtgggtttcaag

SEQ ID NO: 1784 - DNA, 20 bp, Artificial Sequence
  Synthetic
ttgagcgtgtgggtttcaag

SEQ ID NO: 1785 - DNA, 20 bp, Artificial Sequence
  Synthetic
ttgagcgtgtgggtttcaag

SEQ ID NO: 1786 - DNA, 20 bp, Artificial Sequence
  Synthetic
ttgagcgtgtgggtttcaag

SEQ ID NO: 1787 - DNA, 20 bp, Artificial Sequence
  Synthetic
ttgagcgtgtgggtttcaag

SEQ ID NO: 1788 - DNA, 20 bp, Artificial Sequence
  Synthetic
ttgagcgtgtgggtttcaag

SEQ ID NO: 1789 - DNA, 20 bp, Artificial Sequence
  Synthetic
ttgagcgtgtgggtttcaag

SEQ ID NO: 1790 - DNA, 20 bp, Artificial Sequence
  Synthetic
ttgagcgtgtgggtttcaag

SEQ ID NO: 1791 - DNA, 20 bp, Artificial Sequence
  Synthetic
ttgagcgtgtgggtttcaag

SEQ ID NO: 1792 - DNA, 20 bp, Artificial Sequence
  Synthetic
ttgagcgtgtgggtttcaag

SEQ ID NO: 1793 - DNA, 20 bp, Artificial Sequence
  Synthetic
ttgagcgtgtgggtttcaag

SEQ ID NO: 1794 - DNA, 20 bp, Artificial Sequence
  Synthetic
ttgagcgtgtgggtttcaag

SEQ ID NO: 1795 - DNA, 20 bp, Artificial Sequence
  Synthetic
ttgagcgtgtgggtttcaag

SEQ ID NO: 1796 - DNA, 20 bp, Artificial Sequence
  Synthetic
ttgagcgtgtgggtttcaag

SEQ ID NO: 1797 - DNA, 20 bp, Artificial Sequence
  Synthetic
ttgagcgtgtgggtttcaag

SEQ ID NO: 1798 - DNA, 20 bp, Artificial Sequence
  Synthetic
ttgagcgtgtgggtttcaag

SEQ ID NO: 1799 - DNA, 20 bp, Artificial Sequence
  Synthetic
ttgagcgtgtgggtttcaag

SEQ ID NO: 1800 - DNA, 20 bp, Artificial Sequence
  Synthetic
ttgagcgtgtgggtttcaag

SEQ ID NO: 1801 - DNA, 20 bp, Artificial Sequence
  Synthetic
ttgagcgtgtgggtttcaag

SEQ ID NO: 1802 - DNA, 20 bp, Artificial Sequence
  Synthetic
ttgagcgtgtgggtttcaag

SEQ ID NO: 1803 - DNA, 20 bp, Artificial Sequence
  Synthetic
ttgagcgtgtgggtttcaag

SEQ ID NO: 1804 - DNA, 20 bp, Artificial Sequence
  Synthetic
ttgagcgtgtgggtttcaag

SEQ ID NO: 1805 - DNA, 20 bp, Artificial Sequence
  Synthetic
ttgagcgtgtgggtttcaag

SEQ ID NO: 1806 - DNA, 20 bp, Artificial Sequence
  Synthetic
ttgagcgtgtgggtttcaag

SEQ ID NO: 1807 - DNA, 20 bp, Artificial Sequence
  Synthetic
ttgagcgtgtgggtttcaag

SEQ ID NO: 1808 - DNA, 20 bp, Artificial Sequence
  Synthetic
ttgagcgtgtgggtttcaag

SEQ ID NO: 1809 - DNA, 20 bp, Artificial Sequence
  Synthetic
ttgagcgtgtgggtttcaag

SEQ ID NO: 1810 - DNA, 20 bp, Artificial Sequence
  Synthetic
ttgagcgtgtgggtttcaag

SEQ ID NO: 1811 - DNA, 20 bp, Artificial Sequence
  Synthetic
ttgagcgtgtgggtttcaag

SEQ ID NO: 1812 - DNA, 20 bp, Artificial Sequence
  Synthetic
ttgagcgtgtgggtttcaag

SEQ ID NO: 1813 - DNA, 20 bp, Artificial Sequence
  Synthetic
ttgagcgtgtgggtttcaag

SEQ ID NO: 1814 - DNA, 20 bp, Artificial Sequence
  Synthetic
ttgagcgtgtgggtttcaag

SEQ ID NO: 1815 - DNA, 20 bp, Artificial Sequence
  Synthetic
ttgagcgtgtgggtttcaag

SEQ ID NO: 1816 - DNA, 20 bp, Artificial Sequence
  Synthetic
tcacctttcactcactcccc

SEQ ID NO: 1817 - DNA, 20 bp, Artificial Sequence
  Synthetic
tcacctttcactcactcccc

SEQ ID NO: 1818 - DNA, 20 bp, Artificial Sequence
  Synthetic
tcacctttcactcactcccc

SEQ ID NO: 1819 - DNA, 20 bp, Artificial Sequence
  Synthetic
tcacctttcactcactcccc

SEQ ID NO: 1820 - DNA, 20 bp, Artificial Sequence
  Synthetic
tcacctttcactcactcccc

SEQ ID NO: 1821 - DNA, 20 bp, Artificial Sequence
  Synthetic
tcacctttcactcactcccc

SEQ ID NO: 1822 - DNA, 20 bp, Artificial Sequence
  Synthetic
tcacctttcactcactcccc

SEQ ID NO: 1823 - DNA, 20 bp, Artificial Sequence
  Synthetic
tcacctttcactcactcccc

SEQ ID NO: 1824 - DNA, 20 bp, Artificial Sequence
  Synthetic
tcacctttcactcactcccc

SEQ ID NO: 1825 - DNA, 20 bp, Artificial Sequence
  Synthetic
tcacctttcactcactcccc

SEQ ID NO: 1826 - DNA, 20 bp, Artificial Sequence
  Synthetic
tcacctttcactcactcccc

SEQ ID NO: 1827 - DNA, 20 bp, Artificial Sequence
  Synthetic
tcacctttcactcactcccc

SEQ ID NO: 1828 - DNA, 20 bp, Artificial Sequence
  Synthetic
tcacctttcactcactcccc

SEQ ID NO: 1829 - DNA, 20 bp, Artificial Sequence
  Synthetic
tcacctttcactcactcccc

SEQ ID NO: 1830 - DNA, 20 bp, Artificial Sequence
  Synthetic
tcacctttcactcactcccc

SEQ ID NO: 1831 - DNA, 20 bp, Artificial Sequence
  Synthetic
tcacctttcactcactcccc

SEQ ID NO: 1832 - DNA, 20 bp, Artificial Sequence
  Synthetic
tcacctttcactcactcccc

SEQ ID NO: 1833 - DNA, 20 bp, Artificial Sequence
  Synthetic
tcacctttcactcactcccc

SEQ ID NO: 1834 - DNA, 20 bp, Artificial Sequence
  Synthetic
tcacctttcactcactcccc

SEQ ID NO: 1835 - DNA, 20 bp, Artificial Sequence
  Synthetic
tcacctttcactcactcccc

SEQ ID NO: 1836 - DNA, 20 bp, Artificial Sequence
  Synthetic
tcacctttcactcactcccc

SEQ ID NO: 1837 - DNA, 20 bp, Artificial Sequence
  Synthetic
tcacctttcactcactcccc

SEQ ID NO: 1838 - DNA, 20 bp, Artificial Sequence
  Synthetic
tcacctttcactcactcccc

SEQ ID NO: 1839 - DNA, 20 bp, Artificial Sequence
  Synthetic
tcacctttcactcactcccc

SEQ ID NO: 1840 - DNA, 20 bp, Artificial Sequence
  Synthetic
tcacctttcactcactcccc

SEQ ID NO: 1841 - DNA, 20 bp, Artificial Sequence
  Synthetic
tcacctttcactcactcccc

SEQ ID NO: 1842 - DNA, 20 bp, Artificial Sequence
  Synthetic
tcacctttcactcactcccc

SEQ ID NO: 1843 - DNA, 20 bp, Artificial Sequence
  Synthetic
tcacctttcactcactcccc

SEQ ID NO: 1844 - DNA, 20 bp, Artificial Sequence
  Synthetic
tcacctttcactcactcccc

SEQ ID NO: 1845 - DNA, 20 bp, Artificial Sequence
  Synthetic
tcacctttcactcactcccc

SEQ ID NO: 1846 - DNA, 20 bp, Artificial Sequence
  Synthetic
tcacctttcactcactcccc

SEQ ID NO: 1847 - DNA, 20 bp, Artificial Sequence
  Synthetic
tcacctttcactcactcccc

SEQ ID NO: 1848 - DNA, 20 bp, Artificial Sequence
  Synthetic
gctcctttgttccgcataag

SEQ ID NO: 1849 - DNA, 20 bp, Artificial Sequence
  Synthetic
gctcctttgttccgcataag

SEQ ID NO: 1850 - DNA, 20 bp, Artificial Sequence
  Synthetic
gctcctttgttccgcataag

SEQ ID NO: 1851 - DNA, 20 bp, Artificial Sequence
  Synthetic
gctcctttgttccgcataag

SEQ ID NO: 1852 - DNA, 20 bp, Artificial Sequence
  Synthetic
gctcctttgttccgcataag

SEQ ID NO: 1853 - DNA, 20 bp, Artificial Sequence
  Synthetic
gctcctttgttccgcataag

SEQ ID NO: 1854 - DNA, 20 bp, Artificial Sequence
  Synthetic
gctcctttgttccgcataag

SEQ ID NO: 1855 - DNA, 20 bp, Artificial Sequence
  Synthetic
gctcctttgttccgcataag

SEQ ID NO: 1856 - DNA, 20 bp, Artificial Sequence
  Synthetic
gctcctttgttccgcataag

SEQ ID NO: 1857 - DNA, 20 bp, Artificial Sequence
  Synthetic
gctcctttgttccgcataag

SEQ ID NO: 1858 - DNA, 20 bp, Artificial Sequence
  Synthetic
gctcctttgttccgcataag

SEQ ID NO: 1859 - DNA, 20 bp, Artificial Sequence
  Synthetic
gctcctttgttccgcataag

SEQ ID NO: 1860 - DNA, 20 bp, Artificial Sequence
  Synthetic
gctcctttgttccgcataag

SEQ ID NO: 1861 - DNA, 20 bp, Artificial Sequence
  Synthetic
gctcctttgttccgcataag

SEQ ID NO: 1862 - DNA, 20 bp, Artificial Sequence
  Synthetic
gctcctttgttccgcataag

SEQ ID NO: 1863 - DNA, 20 bp, Artificial Sequence
  Synthetic
gctcctttgttccgcataag

SEQ ID NO: 1864 - DNA, 20 bp, Artificial Sequence
  Synthetic
gctcctttgttccgcataag

SEQ ID NO: 1865 - DNA, 20 bp, Artificial Sequence
  Synthetic
gctcctttgttccgcataag

SEQ ID NO: 1866 - DNA, 20 bp, Artificial Sequence
  Synthetic
gctcctttgttccgcataag

SEQ ID NO: 1867 - DNA, 20 bp, Artificial Sequence
  Synthetic
gctcctttgttccgcataag

SEQ ID NO: 1868 - DNA, 20 bp, Artificial Sequence
  Synthetic
gctcctttgttccgcataag

SEQ ID NO: 1869 - DNA, 20 bp, Artificial Sequence
  Synthetic
gctcctttgttccgcataag

SEQ ID NO: 1870 - DNA, 20 bp, Artificial Sequence
  Synthetic
gctcctttgttccgcataag

SEQ ID NO: 1871 - DNA, 20 bp, Artificial Sequence
  Synthetic
gctcctttgttccgcataag

SEQ ID NO: 1872 - DNA, 20 bp, Artificial Sequence
  Synthetic
gctcctttgttccgcataag

SEQ ID NO: 1873 - DNA, 20 bp, Artificial Sequence
  Synthetic
gctcctttgttccgcataag

SEQ ID NO: 1874 - DNA, 20 bp, Artificial Sequence
  Synthetic
gctcctttgttccgcataag

SEQ ID NO: 1875 - DNA, 20 bp, Artificial Sequence
  Synthetic
catgttcaccaaccagatgc

SEQ ID NO: 1876 - DNA, 20 bp, Artificial Sequence
  Synthetic
catgttcaccaaccagatgc

SEQ ID NO: 1877 - DNA, 20 bp, Artificial Sequence
  Synthetic
catgttcaccaaccagatgc

SEQ ID NO: 1878 - DNA, 20 bp, Artificial Sequence
  Synthetic
catgttcaccaaccagatgc

SEQ ID NO: 1879 - DNA, 20 bp, Artificial Sequence
  Synthetic
catgttcaccaaccagatgc

SEQ ID NO: 1880 - DNA, 20 bp, Artificial Sequence
  Synthetic
catgttcaccaaccagatgc

SEQ ID NO: 1881 - DNA, 20 bp, Artificial Sequence
  Synthetic
catgttcaccaaccagatgc

SEQ ID NO: 1882 - DNA, 20 bp, Artificial Sequence
  Synthetic
catgttcaccaaccagatgc

SEQ ID NO: 1883 - DNA, 20 bp, Artificial Sequence
  Synthetic
catgttcaccaaccagatgc

SEQ ID NO: 1884 - DNA, 20 bp, Artificial Sequence
  Synthetic
catgttcaccaaccagatgc

SEQ ID NO: 1885 - DNA, 20 bp, Artificial Sequence
  Synthetic
catgttcaccaaccagatgc

SEQ ID NO: 1886 - DNA, 20 bp, Artificial Sequence
  Synthetic
catgttcaccaaccagatgc

SEQ ID NO: 1887 - DNA, 20 bp, Artificial Sequence
  Synthetic
catgttcaccaaccagatgc

SEQ ID NO: 1888 - DNA, 20 bp, Artificial Sequence
  Synthetic
catgttcaccaaccagatgc

SEQ ID NO: 1889 - DNA, 20 bp, Artificial Sequence
  Synthetic
catgttcaccaaccagatgc

SEQ ID NO: 1890 - DNA, 20 bp, Artificial Sequence
  Synthetic
catgttcaccaaccagatgc

SEQ ID NO: 1891 - DNA, 20 bp, Artificial Sequence
  Synthetic
catgttcaccaaccagatgc

SEQ ID NO: 1892 - DNA, 20 bp, Artificial Sequence
  Synthetic
catgttcaccaaccagatgc

SEQ ID NO: 1893 - DNA, 20 bp, Artificial Sequence
  Synthetic
catgttcaccaaccagatgc

SEQ ID NO: 1894 - DNA, 20 bp, Artificial Sequence
  Synthetic
catgttcaccaaccagatgc

SEQ ID NO: 1895 - DNA, 20 bp, Artificial Sequence
  Synthetic
catgttcaccaaccagatgc

SEQ ID NO: 1896 - DNA, 20 bp, Artificial Sequence
  Synthetic
catgttcaccaaccagatgc

SEQ ID NO: 1897 - DNA, 20 bp, Artificial Sequence
  Synthetic
catgttcaccaaccagatgc

SEQ ID NO: 1898 - DNA, 20 bp, Artificial Sequence
  Synthetic
caggagcgctttgaaagaca

SEQ ID NO: 1899 - DNA, 20 bp, Artificial Sequence
  Synthetic
caggagcgctttgaaagaca

SEQ ID NO: 1900 - DNA, 20 bp, Artificial Sequence
  Synthetic
caggagcgctttgaaagaca

SEQ ID NO: 1901 - DNA, 20 bp, Artificial Sequence
  Synthetic
caggagcgctttgaaagaca

SEQ ID NO: 1902 - DNA, 20 bp, Artificial Sequence
  Synthetic
caggagcgctttgaaagaca

SEQ ID NO: 1903 - DNA, 20 bp, Artificial Sequence
  Synthetic
caggagcgctttgaaagaca

SEQ ID NO: 1904 - DNA, 20 bp, Artificial Sequence
  Synthetic
caggagcgctttgaaagaca

SEQ ID NO: 1905 - DNA, 20 bp, Artificial Sequence
  Synthetic
caggagcgctttgaaagaca

SEQ ID NO: 1906 - DNA, 20 bp, Artificial Sequence
  Synthetic
caggagcgctttgaaagaca

SEQ ID NO: 1907 - DNA, 20 bp, Artificial Sequence
  Synthetic
caggagcgctttgaaagaca

SEQ ID NO: 1908 - DNA, 20 bp, Artificial Sequence
  Synthetic
caggagcgctttgaaagaca

SEQ ID NO: 1909 - DNA, 20 bp, Artificial Sequence
  Synthetic
caggagcgctttgaaagaca

SEQ ID NO: 1910 - DNA, 20 bp, Artificial Sequence
  Synthetic
caggagcgctttgaaagaca

SEQ ID NO: 1911 - DNA, 20 bp, Artificial Sequence
  Synthetic
caggagcgctttgaaagaca

SEQ ID NO: 1912 - DNA, 20 bp, Artificial Sequence
  Synthetic
caggagcgctttgaaagaca

SEQ ID NO: 1913 - DNA, 20 bp, Artificial Sequence
  Synthetic
caggagcgctttgaaagaca

SEQ ID NO: 1914 - DNA, 20 bp, Artificial Sequence
  Synthetic
caggagcgctttgaaagaca

SEQ ID NO: 1915 - DNA, 20 bp, Artificial Sequence
  Synthetic
caggagcgctttgaaagaca

SEQ ID NO: 1916 - DNA, 20 bp, Artificial Sequence
  Synthetic
caggagcgctttgaaagaca

SEQ ID NO: 1917 - DNA, 20 bp, Artificial Sequence
  Synthetic
caggagcgctttgaaagaca

SEQ ID NO: 1918 - DNA, 20 bp, Artificial Sequence
  Synthetic
caggagcgctttgaaagaca

SEQ ID NO: 1919 - DNA, 20 bp, Artificial Sequence
  Synthetic
caggagcgctttgaaagaca

SEQ ID NO: 1920 - DNA, 20 bp, Artificial Sequence
  Synthetic
caggagcgctttgaaagaca

SEQ ID NO: 1921 - DNA, 20 bp, Artificial Sequence
  Synthetic
caggagcgctttgaaagaca

SEQ ID NO: 1922 - DNA, 20 bp, Artificial Sequence
  Synthetic
caggagcgctttgaaagaca

SEQ ID NO: 1923 - DNA, 20 bp, Artificial Sequence
  Synthetic
caggagcgctttgaaagaca

SEQ ID NO: 1924 - DNA, 20 bp, Artificial Sequence
  Synthetic
caggagcgctttgaaagaca

SEQ ID NO: 1925 - DNA, 20 bp, Artificial Sequence
  Synthetic
caggagcgctttgaaagaca

SEQ ID NO: 1926 - DNA, 20 bp, Artificial Sequence
  Synthetic
caggagcgctttgaaagaca

SEQ ID NO: 1927 - DNA, 20 bp, Artificial Sequence
  Synthetic
caggagcgctttgaaagaca

SEQ ID NO: 1928 - DNA, 20 bp, Artificial Sequence
  Synthetic
caggagcgctttgaaagaca

SEQ ID NO: 1929 - DNA, 20 bp, Artificial Sequence
  Synthetic
caggagcgctttgaaagaca

SEQ ID NO: 1930 - DNA, 20 bp, Artificial Sequence
  Synthetic
caggagcgctttgaaagaca

SEQ ID NO: 1931 - DNA, 20 bp, Artificial Sequence
  Synthetic
caggagcgctttgaaagaca

SEQ ID NO: 1932 - DNA, 20 bp, Artificial Sequence
  Synthetic
caggagcgctttgaaagaca

SEQ ID NO: 1933 - DNA, 20 bp, Artificial Sequence
  Synthetic
caggagcgctttgaaagaca

SEQ ID NO: 1934 - DNA, 20 bp, Artificial Sequence
  Synthetic
caggagcgctttgaaagaca

SEQ ID NO: 1935 - DNA, 20 bp, Artificial Sequence
  Synthetic
caggagcgctttgaaagaca

SEQ ID NO: 1936 - DNA, 20 bp, Artificial Sequence
  Synthetic
caggagcgctttgaaagaca

SEQ ID NO: 1937 - DNA, 20 bp, Artificial Sequence
  Synthetic
caggagcgctttgaaagaca

SEQ ID NO: 1938 - DNA, 20 bp, Artificial Sequence
  Synthetic
caggagcgctttgaaagaca

SEQ ID NO: 1939 - DNA, 20 bp, Artificial Sequence
  Synthetic
caggagcgctttgaaagaca

SEQ ID NO: 1940 - DNA, 20 bp, Artificial Sequence
  Synthetic
caggagcgctttgaaagaca

SEQ ID NO: 1941 - DNA, 20 bp, Artificial Sequence
  Synthetic
caggagcgctttgaaagaca

SEQ ID NO: 1942 - DNA, 20 bp, Artificial Sequence
  Synthetic
caggagcgctttgaaagaca

SEQ ID NO: 1943 - DNA, 20 bp, Artificial Sequence
  Synthetic
caggagcgctttgaaagaca

SEQ ID NO: 1944 - DNA, 20 bp, Artificial Sequence
  Synthetic
caggagcgctttgaaagaca

SEQ ID NO: 1945 - DNA, 20 bp, Artificial Sequence
  Synthetic
caggagcgctttgaaagaca

SEQ ID NO: 1946 - DNA, 20 bp, Artificial Sequence
  Synthetic
caggagcgctttgaaagaca

SEQ ID NO: 1947 - DNA, 20 bp, Artificial Sequence
  Synthetic
caggagcgctttgaaagaca

SEQ ID NO: 1948 - DNA, 20 bp, Artificial Sequence
  Synthetic
caggagcgctttgaaagaca

SEQ ID NO: 1949 - DNA, 20 bp, Artificial Sequence
  Synthetic
caggagcgctttgaaagaca

SEQ ID NO: 1950 - DNA, 20 bp, Artificial Sequence
  Synthetic
caggagcgctttgaaagaca

SEQ ID NO: 1951 - DNA, 20 bp, Artificial Sequence
  Synthetic
caggagcgctttgaaagaca

SEQ ID NO: 1952 - DNA, 20 bp, Artificial Sequence
  Synthetic
caggagcgctttgaaagaca

SEQ ID NO: 1953 - DNA, 20 bp, Artificial Sequence
  Synthetic
caggagcgctttgaaagaca

SEQ ID NO: 1954 - DNA, 20 bp, Artificial Sequence
  Synthetic
caggagcgctttgaaagaca

SEQ ID NO: 1955 - DNA, 20 bp, Artificial Sequence
  Synthetic
cccagtcagccacaaaatca

SEQ ID NO: 1956 - DNA, 20 bp, Artificial Sequence
  Synthetic
cccagtcagccacaaaatca

SEQ ID NO: 1957 - DNA, 20 bp, Artificial Sequence
  Synthetic
cccagtcagccacaaaatca

SEQ ID NO: 1958 - DNA, 20 bp, Artificial Sequence
  Synthetic
cccagtcagccacaaaatca

SEQ ID NO: 1959 - DNA, 20 bp, Artificial Sequence
  Synthetic
cccagtcagccacaaaatca

SEQ ID NO: 1960 - DNA, 20 bp, Artificial Sequence
  Synthetic
cgccctgccccttgttactt

SEQ ID NO: 1961 - DNA, 20 bp, Artificial Sequence
  Synthetic
cgccctgccccttgttactt

SEQ ID NO: 1962 - DNA, 20 bp, Artificial Sequence
  Synthetic
ctgggtgctggcagtgacaa

SEQ ID NO: 1963 - DNA, 20 bp, Artificial Sequence
  Synthetic
aaagaagctgtggcagtgga

SEQ ID NO: 1964 - DNA, 20 bp, Artificial Sequence
  Synthetic
aaagaagctgtggcagtgga

SEQ ID NO: 1965 - DNA, 20 bp, Artificial Sequence
  Synthetic
acagaagggggacagagagt

SEQ ID NO: 1966 - DNA, 20 bp, Artificial Sequence
  Synthetic
ttctgggcacttcacagtca

SEQ ID NO: 1967 - DNA, 20 bp, Artificial Sequence
  Synthetic
ctgtgagcactgaggaaggg

SEQ ID NO: 1968 - DNA, 20 bp, Artificial Sequence
  Synthetic
ctgtgagcactgaggaaggg

SEQ ID NO: 1969 - DNA, 20 bp, Artificial Sequence
  Synthetic
ctgtgagcactgaggaaggg

SEQ ID NO: 1970 - DNA, 20 bp, Artificial Sequence
  Synthetic
ctgtgagcactgaggaaggg

SEQ ID NO: 1971 - DNA, 20 bp, Artificial Sequence
  Synthetic
ctgtgagcactgaggaaggg

SEQ ID NO: 1972 - DNA, 20 bp, Artificial Sequence
  Synthetic
acacagcctgacagagttgg

SEQ ID NO: 1973 - DNA, 20 bp, Artificial Sequence
  Synthetic
acacagcctgacagagttgg

SEQ ID NO: 1974 - DNA, 20 bp, Artificial Sequence
  Synthetic
acacagcctgacagagttgg

SEQ ID NO: 1975 - DNA, 20 bp, Artificial Sequence
  Synthetic
acacagcctgacagagttgg

SEQ ID NO: 1976 - DNA, 20 bp, Artificial Sequence
  Synthetic
acacagcctgacagagttgg

SEQ ID NO: 1977 - DNA, 20 bp, Artificial Sequence
  Synthetic
acacagcctgacagagttgg

SEQ ID NO: 1978 - DNA, 20 bp, Artificial Sequence
  Synthetic
acacagcctgacagagttgg

SEQ ID NO: 1979 - DNA, 20 bp, Artificial Sequence
  Synthetic
acacagcctgacagagttgg

SEQ ID NO: 1980 - DNA, 20 bp, Artificial Sequence
  Synthetic
ttgcttttgaccacgtgcag

SEQ ID NO: 1981 - DNA, 20 bp, Artificial Sequence
  Synthetic
acacagcctgacagagttgg

SEQ ID NO: 1982 - DNA, 20 bp, Artificial Sequence
  Synthetic
acacagcctgacagagttgg

SEQ ID NO: 1983 - DNA, 20 bp, Artificial Sequence
  Synthetic
acacagcctgacagagttgg

SEQ ID NO: 1984 - DNA, 20 bp, Artificial Sequence
  Synthetic
ttgcttttgaccacgtgcag

SEQ ID NO: 1985 - DNA, 23 bp, Artificial Sequence
  Synthetic
gctccagactggacatctccaac

SEQ ID NO: 1986 - DNA, 23 bp, Artificial Sequence
  Synthetic
gctccagactggacatctccaac

SEQ ID NO: 1987 - DNA, 23 bp, Artificial Sequence
  Synthetic
gctccagactggacatctccaac

SEQ ID NO: 1988 - DNA, 23 bp, Artificial Sequence
  Synthetic
gccatgattaacctgaccctgca

SEQ ID NO: 1989 - DNA, 23 bp, Artificial Sequence
  Synthetic
gccatgattaacctgaccctgca

SEQ ID NO: 1990 - DNA, 23 bp, Artificial Sequence
  Synthetic
gccatgattaacctgaccctgca

SEQ ID NO: 1991 - DNA, 23 bp, Artificial Sequence
  Synthetic
gccatgattaacctgaccctgca

SEQ ID NO: 1992 - DNA, 23 bp, Artificial Sequence
  Synthetic
gccatgattaacctgaccctgca

SEQ ID NO: 1993 - DNA, 23 bp, Artificial Sequence
  Synthetic
gccatgattaacctgaccctgca

SEQ ID NO: 1994 - DNA, 23 bp, Artificial Sequence
  Synthetic
gccatgattaacctgaccctgca

SEQ ID NO: 1995 - DNA, 23 bp, Artificial Sequence
  Synthetic
gcagaggaagacgccatctcaaa

SEQ ID NO: 1996 - DNA, 23 bp, Artificial Sequence
  Synthetic
gcagaggaagacgccatctcaaa

SEQ ID NO: 1997 - DNA, 23 bp, Artificial Sequence
  Synthetic
tgtgaaaggagcaaagggtcagg

SEQ ID NO: 1998 - DNA, 20 bp, Artificial Sequence
  Synthetic
tgggtgctgagcatacacag

SEQ ID NO: 1999 - DNA, 20 bp, Artificial Sequence
  Synthetic
tgggtgctgagcatacacag

SEQ ID NO: 2000 - DNA, 20 bp, Artificial Sequence
  Synthetic
tgggtgctgagcatacacag

SEQ ID NO: 2001 - DNA, 20 bp, Artificial Sequence
  Synthetic
aaaggagcaaagggtcaggg

SEQ ID NO: 2002 - DNA, 20 bp, Artificial Sequence
  Synthetic
aaaggagcaaagggtcaggg

SEQ ID NO: 2003 - DNA, 20 bp, Artificial Sequence
  Synthetic
aaaggagcaaagggtcaggg

SEQ ID NO: 2004 - DNA, 20 bp, Artificial Sequence
  Synthetic
aaaggagcaaagggtcaggg

SEQ ID NO: 2005 - DNA, 20 bp, Artificial Sequence
  Synthetic
aaaggagcaaagggtcaggg

SEQ ID NO: 2006 - DNA, 20 bp, Artificial Sequence
  Synthetic
aaaggagcaaagggtcaggg

SEQ ID NO: 2007 - DNA, 23 bp, Artificial Sequence
  Synthetic
ggcgtgacctacacccttaacag

SEQ ID NO: 2008 - DNA, 20 bp, Artificial Sequence
  Synthetic
tttctctggctgggcttagc

SEQ ID NO: 2009 - DNA, 20 bp, Artificial Sequence
  Synthetic
tttctctggctgggcttagc

SEQ ID NO: 2010 - DNA, 20 bp, Artificial Sequence
  Synthetic
tttctctggctgggcttagc

SEQ ID NO: 2011 - DNA, 20 bp, Artificial Sequence
  Synthetic
tttctctggctgggcttagc

SEQ ID NO: 2012 - DNA, 20 bp, Artificial Sequence
  Synthetic
ggccctcccaagtttcctac

SEQ ID NO: 2013 - DNA, 20 bp, Artificial Sequence
  Synthetic
atgggttcaactccacagcc

SEQ ID NO: 2014 - DNA, 20 bp, Artificial Sequence
  Synthetic
atgggttcaactccacagcc

SEQ ID NO: 2015 - DNA, 20 bp, Artificial Sequence
  Synthetic
atgggttcaactccacagcc

SEQ ID NO: 2016 - DNA, 20 bp, Artificial Sequence
  Synthetic
atgggttcaactccacagcc

SEQ ID NO: 2017 - DNA, 20 bp, Artificial Sequence
  Synthetic
atgggttcaactccacagcc

SEQ ID NO: 2018 - DNA, 20 bp, Artificial Sequence
  Synthetic
atgggttcaactccacagcc

SEQ ID NO: 2019 - DNA, 20 bp, Artificial Sequence
  Synthetic
atgggttcaactccacagcc

SEQ ID NO: 2020 - DNA, 20 bp, Artificial Sequence
  Synthetic
atgggttcaactccacagcc

SEQ ID NO: 2021 - DNA, 20 bp, Artificial Sequence
  Synthetic
atgggttcaactccacagcc

SEQ ID NO: 2022 - DNA, 20 bp, Artificial Sequence
  Synthetic
tggaagctccattcaggcag

SEQ ID NO: 2023 - DNA, 20 bp, Artificial Sequence
  Synthetic
tggaagctccattcaggcag

SEQ ID NO: 2024 - DNA, 23 bp, Artificial Sequence
  Synthetic
tgcacttggtagaaagcagggac

SEQ ID NO: 2025 - DNA, 23 bp, Artificial Sequence
  Synthetic
tgcacttggtagaaagcagggac

SEQ ID NO: 2026 - DNA, 20 bp, Artificial Sequence
  Synthetic
ggctgtggagttgaacccat

SEQ ID NO: 2027 - DNA, 20 bp, Artificial Sequence
  Synthetic
ggctgtggagttgaacccat

SEQ ID NO: 2028 - DNA, 20 bp, Artificial Sequence
  Synthetic
ggctgtggagttgaacccat

SEQ ID NO: 2029 - DNA, 20 bp, Artificial Sequence
  Synthetic
ggctgtggagttgaacccat

SEQ ID NO: 2030 - DNA, 20 bp, Artificial Sequence
  Synthetic
ggctgtggagttgaacccat

SEQ ID NO: 2031 - DNA, 20 bp, Artificial Sequence
  Synthetic
ggctgtggagttgaacccat

SEQ ID NO: 2032 - DNA, 20 bp, Artificial Sequence
  Synthetic
gcgttgctgctagctctttc

SEQ ID NO: 2033 - DNA, 20 bp, Artificial Sequence
  Synthetic
gcgttgctgctagctctttc

SEQ ID NO: 2034 - DNA, 20 bp, Artificial Sequence
  Synthetic
gcgttgctgctagctctttc

SEQ ID NO: 2035 - DNA, 20 bp, Artificial Sequence
  Synthetic
gcgttgctgctagctctttc

SEQ ID NO: 2036 - DNA, 20 bp, Artificial Sequence
  Synthetic
tgggggagcatagaccttgt

SEQ ID NO: 2037 - DNA, 20 bp, Artificial Sequence
  Synthetic
tgggggagcatagaccttgt

SEQ ID NO: 2038 - DNA, 20 bp, Artificial Sequence
  Synthetic
tgggggagcatagaccttgt

SEQ ID NO: 2039 - DNA, 20 bp, Artificial Sequence
  Synthetic
tgggggagcatagaccttgt

SEQ ID NO: 2040 - DNA, 20 bp, Artificial Sequence
  Synthetic
cctgaagttgcccactctgt

SEQ ID NO: 2041 - DNA, 20 bp, Artificial Sequence
  Synthetic
cctgaagttgcccactctgt

SEQ ID NO: 2042 - DNA, 20 bp, Artificial Sequence
  Synthetic
cctgaagttgcccactctgt

SEQ ID NO: 2043 - DNA, 20 bp, Artificial Sequence
  Synthetic
cctgaagttgcccactctgt

SEQ ID NO: 2044 - DNA, 20 bp, Artificial Sequence
  Synthetic
cctgaagttgcccactctgt

SEQ ID NO: 2045 - DNA, 20 bp, Artificial Sequence
  Synthetic
cctgaagttgcccactctgt

SEQ ID NO: 2046 - DNA, 20 bp, Artificial Sequence
  Synthetic
cctgaagttgcccactctgt

SEQ ID NO: 2047 - DNA, 20 bp, Artificial Sequence
  Synthetic
tgagtctgagtacccgaggg

SEQ ID NO: 2048 - DNA, 20 bp, Artificial Sequence
  Synthetic
tgagtctgagtacccgaggg

SEQ ID NO: 2049 - DNA, 20 bp, Artificial Sequence
  Synthetic
cctgaagttgcccactctgt

SEQ ID NO: 2050 - DNA, 20 bp, Artificial Sequence
  Synthetic
tgagtctgagtacccgaggg

SEQ ID NO: 2051 - DNA, 20 bp, Artificial Sequence
  Synthetic
tgagtctgagtacccgaggg

SEQ ID NO: 2052 - DNA, 20 bp, Artificial Sequence
  Synthetic
tgagtctgagtacccgaggg

SEQ ID NO: 2053 - DNA, 20 bp, Artificial Sequence
  Synthetic
tgagtctgagtacccgaggg

SEQ ID NO: 2054 - DNA, 20 bp, Artificial Sequence
  Synthetic
tggaaaagtggtgcagaggg

SEQ ID NO: 2055 - DNA, 20 bp, Artificial Sequence
  Synthetic
tggaaaagtggtgcagaggg

SEQ ID NO: 2056 - DNA, 20 bp, Artificial Sequence
  Synthetic
gggccatcaatcaccatcca

SEQ ID NO: 2057 - DNA, 20 bp, Artificial Sequence
  Synthetic
gggccatcaatcaccatcca

SEQ ID NO: 2058 - DNA, 20 bp, Artificial Sequence
  Synthetic
gggccatcaatcaccatcca

SEQ ID NO: 2059 - DNA, 20 bp, Artificial Sequence
  Synthetic
cagcaactgcagcaactcag

SEQ ID NO: 2060 - DNA, 20 bp, Artificial Sequence
  Synthetic
cagcaactgcagcaactcag

SEQ ID NO: 2061 - DNA, 20 bp, Artificial Sequence
  Synthetic
cagcaactgcagcaactcag

SEQ ID NO: 2062 - DNA, 20 bp, Artificial Sequence
  Synthetic
cagcaactgcagcaactcag

SEQ ID NO: 2063 - DNA, 20 bp, Artificial Sequence
  Synthetic
cagcaactgcagcaactcag

SEQ ID NO: 2064 - DNA, 20 bp, Artificial Sequence
  Synthetic
cagcaactgcagcaactcag

SEQ ID NO: 2065 - DNA, 20 bp, Artificial Sequence
  Synthetic
cagcaactgcagcaactcag

SEQ ID NO: 2066 - DNA, 20 bp, Artificial Sequence
  Synthetic
gcaacccattagcccagact

SEQ ID NO: 2067 - DNA, 20 bp, Artificial Sequence
  Synthetic
gcaacccattagcccagact

SEQ ID NO: 2068 - DNA, 20 bp, Artificial Sequence
  Synthetic
gcaacccattagcccagact

SEQ ID NO: 2069 - DNA, 20 bp, Artificial Sequence
  Synthetic
gcaacccattagcccagact

SEQ ID NO: 2070 - DNA, 20 bp, Artificial Sequence
  Synthetic
gcaacccattagcccagact

SEQ ID NO: 2071 - DNA, 20 bp, Artificial Sequence
  Synthetic
agccagaccagacacacaac

SEQ ID NO: 2072 - DNA, 20 bp, Artificial Sequence
  Synthetic
agccagaccagacacacaac

SEQ ID NO: 2073 - DNA, 20 bp, Artificial Sequence
  Synthetic
agccagaccagacacacaac

SEQ ID NO: 2074 - DNA, 20 bp, Artificial Sequence
  Synthetic
agccagaccagacacacaac

SEQ ID NO: 2075 - DNA, 20 bp, Artificial Sequence
  Synthetic
agccagaccagacacacaac

SEQ ID NO: 2076 - DNA, 20 bp, Artificial Sequence
  Synthetic
agccagaccagacacacaac

SEQ ID NO: 2077 - DNA, 20 bp, Artificial Sequence
  Synthetic
agccagaccagacacacaac

SEQ ID NO: 2078 - DNA, 20 bp, Artificial Sequence
  Synthetic
agccagaccagacacacaac

SEQ ID NO: 2079 - DNA, 20 bp, Artificial Sequence
  Synthetic
cagcccagacatccacatgt

SEQ ID NO: 2080 - DNA, 20 bp, Artificial Sequence
  Synthetic
cagcccagacatccacatgt

SEQ ID NO: 2081 - DNA, 20 bp, Artificial Sequence
  Synthetic
cagcccagacatccacatgt

SEQ ID NO: 2082 - DNA, 20 bp, Artificial Sequence
  Synthetic
cagcccagacatccacatgt

SEQ ID NO: 2083 - DNA, 20 bp, Artificial Sequence
  Synthetic
cagcccagacatccacatgt

SEQ ID NO: 2084 - DNA, 20 bp, Artificial Sequence
  Synthetic
cagcccagacatccacatgt

SEQ ID NO: 2085 - DNA, 20 bp, Artificial Sequence
  Synthetic
cagcccagacatccacatgt

SEQ ID NO: 2086 - DNA, 20 bp, Artificial Sequence
  Synthetic
cagcccagacatccacatgt

SEQ ID NO: 2087 - DNA, 20 bp, Artificial Sequence
  Synthetic
cagcccagacatccacatgt

SEQ ID NO: 2088 - DNA, 20 bp, Artificial Sequence
  Synthetic
cagcccagacatccacatgt

SEQ ID NO: 2089 - DNA, 20 bp, Artificial Sequence
  Synthetic
cagcccagacatccacatgt

SEQ ID NO: 2090 - DNA, 20 bp, Artificial Sequence
  Synthetic
cagcccagacatccacatgt

SEQ ID NO: 2091 - DNA, 20 bp, Artificial Sequence
  Synthetic
acagcccagacatccacatg

SEQ ID NO: 2092 - DNA, 20 bp, Artificial Sequence
  Synthetic
caaggtgctgagagccaaga

SEQ ID NO: 2093 - DNA, 20 bp, Artificial Sequence
  Synthetic
caaggtgctgagagccaaga

SEQ ID NO: 2094 - DNA, 20 bp, Artificial Sequence
  Synthetic
caaggtgctgagagccaaga

SEQ ID NO: 2095 - DNA, 20 bp, Artificial Sequence
  Synthetic
caaggtgctgagagccaaga

SEQ ID NO: 2096 - DNA, 20 bp, Artificial Sequence
  Synthetic
caaggtgctgagagccaaga

SEQ ID NO: 2097 - DNA, 20 bp, Artificial Sequence
  Synthetic
caaggtgctgagagccaaga

SEQ ID NO: 2098 - DNA, 20 bp, Artificial Sequence
  Synthetic
caaggtgctgagagccaaga

SEQ ID NO: 2099 - DNA, 20 bp, Artificial Sequence
  Synthetic
caaggtgctgagagccaaga

SEQ ID NO: 2100 - DNA, 20 bp, Artificial Sequence
  Synthetic
caaggtgctgagagccaaga

SEQ ID NO: 2101 - DNA, 20 bp, Artificial Sequence
  Synthetic
caaggtgctgagagccaaga

SEQ ID NO: 2102 - DNA, 20 bp, Artificial Sequence
  Synthetic
caaggtgctgagagccaaga

SEQ ID NO: 2103 - DNA, 20 bp, Artificial Sequence
  Synthetic
ggtctcgaggttgtcactgg

SEQ ID NO: 2104 - DNA, 20 bp, Artificial Sequence
  Synthetic
ggtctcgaggttgtcactgg

SEQ ID NO: 2105 - DNA, 20 bp, Artificial Sequence
  Synthetic
cccgggacataaaggtggac

SEQ ID NO: 2106 - DNA, 20 bp, Artificial Sequence
  Synthetic
cccgggacataaaggtggac

SEQ ID NO: 2107 - DNA, 20 bp, Artificial Sequence
  Synthetic
agtgtgagtcaggggtcaga

SEQ ID NO: 2108 - DNA, 20 bp, Artificial Sequence
  Synthetic
agtgtgagtcaggggtcaga

SEQ ID NO: 2109 - DNA, 20 bp, Artificial Sequence
  Synthetic
agtgtgagtcaggggtcaga

SEQ ID NO: 2110 - DNA, 20 bp, Artificial Sequence
  Synthetic
agtgtgagtcaggggtcaga

SEQ ID NO: 2111 - DNA, 20 bp, Artificial Sequence
  Synthetic
agtgtgagtcaggggtcaga

SEQ ID NO: 2112 - DNA, 20 bp, Artificial Sequence
  Synthetic
tcaccagttctgtgggcatc

SEQ ID NO: 2113 - DNA, 20 bp, Artificial Sequence
  Synthetic
tcaccagttctgtgggcatc

SEQ ID NO: 2114 - DNA, 20 bp, Artificial Sequence
  Synthetic
tcaccagttctgtgggcatc

SEQ ID NO: 2115 - DNA, 20 bp, Artificial Sequence
  Synthetic
tcaccagttctgtgggcatc

SEQ ID NO: 2116 - DNA, 20 bp, Artificial Sequence
  Synthetic
tcaccagttctgtgggcatc

SEQ ID NO: 2117 - DNA, 20 bp, Artificial Sequence
  Synthetic
gccatgaggttcagctcact

SEQ ID NO: 2118 - DNA, 20 bp, Artificial Sequence
  Synthetic
agcagctggtccatttaccc

SEQ ID NO: 2119 - DNA, 20 bp, Artificial Sequence
  Synthetic
agcagctggtccatttaccc

SEQ ID NO: 2120 - DNA, 20 bp, Artificial Sequence
  Synthetic
agcagctggtccatttaccc

SEQ ID NO: 2121 - DNA, 20 bp, Artificial Sequence
  Synthetic
agcagctggtccatttaccc

SEQ ID NO: 2122 - DNA, 20 bp, Artificial Sequence
  Synthetic
agcagctggtccatttaccc

SEQ ID NO: 2123 - DNA, 20 bp, Artificial Sequence
  Synthetic
ggccatgagtagcttgagca

SEQ ID NO: 2124 - DNA, 20 bp, Artificial Sequence
  Synthetic
ggccatgagtagcttgagca

SEQ ID NO: 2125 - DNA, 20 bp, Artificial Sequence
  Synthetic
ggccatgagtagcttgagca

SEQ ID NO: 2126 - DNA, 20 bp, Artificial Sequence
  Synthetic
gaggtgagcagagcttcctg

SEQ ID NO: 2127 - DNA, 20 bp, Artificial Sequence
  Synthetic
ttagttgggcttggtgggac

SEQ ID NO: 2128 - DNA, 20 bp, Artificial Sequence
  Synthetic
ttagttgggcttggtgggac

SEQ ID NO: 2129 - DNA, 20 bp, Artificial Sequence
  Synthetic
ttagttgggcttggtgggac

SEQ ID NO: 2130 - DNA, 20 bp, Artificial Sequence
  Synthetic
ttagttgggcttggtgggac

SEQ ID NO: 2131 - DNA, 20 bp, Artificial Sequence
  Synthetic
ttagttgggcttggtgggac

SEQ ID NO: 2132 - DNA, 20 bp, Artificial Sequence
  Synthetic
ttagttgggcttggtgggac

SEQ ID NO: 2133 - DNA, 20 bp, Artificial Sequence
  Synthetic
ttagttgggcttggtgggac

SEQ ID NO: 2134 - DNA, 20 bp, Artificial Sequence
  Synthetic
ttagttgggcttggtgggac

SEQ ID NO: 2135 - DNA, 20 bp, Artificial Sequence
  Synthetic
ttagttgggcttggtgggac

SEQ ID NO: 2136 - DNA, 20 bp, Artificial Sequence
  Synthetic
attgttccgtgggtggagtc

SEQ ID NO: 2137 - DNA, 20 bp, Artificial Sequence
  Synthetic
attgttccgtgggtggagtc

SEQ ID NO: 2138 - DNA, 20 bp, Artificial Sequence
  Synthetic
tgtttgctgtgtaccaggca

SEQ ID NO: 2139 - DNA, 20 bp, Artificial Sequence
  Synthetic
tgtttgctgtgtaccaggca

SEQ ID NO: 2140 - DNA, 20 bp, Artificial Sequence
  Synthetic
caggtgattttgcccaaccg

SEQ ID NO: 2141 - DNA, 20 bp, Artificial Sequence
  Synthetic
cggttccaagcccccaactt

SEQ ID NO: 2142 - DNA, 20 bp, Artificial Sequence
  Synthetic
cggttccaagcccccaactt

SEQ ID NO: 2143 - DNA, 20 bp, Artificial Sequence
  Synthetic
caaaaagctgtggcaggccg

SEQ ID NO: 2144 - DNA, 20 bp, Artificial Sequence
  Synthetic
ggcttagaggatggtgctcc

SEQ ID NO: 2145 - DNA, 20 bp, Artificial Sequence
  Synthetic
ggcttagaggatggtgctcc

SEQ ID NO: 2146 - DNA, 20 bp, Artificial Sequence
  Synthetic
aagcgaggcaaaaagctgtg

SEQ ID NO: 2147 - DNA, 20 bp, Artificial Sequence
  Synthetic
cagctgcagggtcaggttaa

SEQ ID NO: 2148 - DNA, 20 bp, Artificial Sequence
  Synthetic
ccacagctagaagttggggg

SEQ ID NO: 2149 - DNA, 20 bp, Artificial Sequence
  Synthetic
ccacagctagaagttggggg

SEQ ID NO: 2150 - DNA, 20 bp, Artificial Sequence
  Synthetic
ccacagctagaagttggggg

SEQ ID NO: 2151 - DNA, 20 bp, Artificial Sequence
  Synthetic
ccacagctagaagttggggg

SEQ ID NO: 2152 - DNA, 20 bp, Artificial Sequence
  Synthetic
agcacaaatcagcctcctcc

SEQ ID NO: 2153 - DNA, 20 bp, Artificial Sequence
  Synthetic
gcacaaatcagcctcctcct

SEQ ID NO: 2154 - DNA, 20 bp, Artificial Sequence
  Synthetic
gcacaaatcagcctcctcct

SEQ ID NO: 2155 - DNA, 20 bp, Artificial Sequence
  Synthetic
gcacaaatcagcctcctcct

SEQ ID NO: 2156 - DNA, 20 bp, Artificial Sequence
  Synthetic
gcacaaatcagcctcctcct

SEQ ID NO: 2157 - DNA, 20 bp, Artificial Sequence
  Synthetic
gcacaaatcagcctcctcct

SEQ ID NO: 2158 - DNA, 20 bp, Artificial Sequence
  Synthetic
gcacaaatcagcctcctcct

SEQ ID NO: 2159 - DNA, 20 bp, Artificial Sequence
  Synthetic
gcacaaatcagcctcctcct

SEQ ID NO: 2160 - DNA, 20 bp, Artificial Sequence
  Synthetic
acctctctgaccaccagtgt

SEQ ID NO: 2161 - DNA, 20 bp, Artificial Sequence
  Synthetic
actgcctgttttcatggcct

SEQ ID NO: 2162 - DNA, 20 bp, Artificial Sequence
  Synthetic
acctctctgaccaccagtgt

SEQ ID NO: 2163 - DNA, 20 bp, Artificial Sequence
  Synthetic
acctctctgaccaccagtgt

SEQ ID NO: 2164 - DNA, 20 bp, Artificial Sequence
  Synthetic
acctctctgaccaccagtgt

SEQ ID NO: 2165 - DNA, 20 bp, Artificial Sequence
  Synthetic
actgcctgttttcatggcct

SEQ ID NO: 2166 - DNA, 23 bp, Artificial Sequence
  Synthetic
gcagaggaagacgccatctcaaa

SEQ ID NO: 2167 - DNA, 23 bp, Artificial Sequence
  Synthetic
gcagaggaagacgccatctcaaa

SEQ ID NO: 2168 - DNA, 23 bp, Artificial Sequence
  Synthetic
gcagaggaagacgccatctcaaa

SEQ ID NO: 2169 - DNA, 23 bp, Artificial Sequence
  Synthetic
gcagaggaagacgccatctcaaa

SEQ ID NO: 2170 - DNA, 23 bp, Artificial Sequence
  Synthetic
gcagaggaagacgccatctcaaa

SEQ ID NO: 2171 - DNA, 23 bp, Artificial Sequence
  Synthetic
gcagaggaagacgccatctcaaa

SEQ ID NO: 2172 - DNA, 23 bp, Artificial Sequence
  Synthetic
gcagaggaagacgccatctcaaa

SEQ ID NO: 2173 - DNA, 23 bp, Artificial Sequence
  Synthetic
gcagaggaagacgccatctcaaa

SEQ ID NO: 2174 - DNA, 23 bp, Artificial Sequence
  Synthetic
gcagaggaagacgccatctcaaa

SEQ ID NO: 2175 - DNA, 23 bp, Artificial Sequence
  Synthetic
gcagaggaagacgccatctcaaa

SEQ ID NO: 2176 - DNA, 23 bp, Artificial Sequence
  Synthetic
gctccagactggacatctccaac

SEQ ID NO: 2177 - DNA, 23 bp, Artificial Sequence
  Synthetic
gctccagactggacatctccaac

SEQ ID NO: 2178 - DNA, 23 bp, Artificial Sequence
  Synthetic
agctaccgtgtctggccctatta

SEQ ID NO: 2179 - DNA, 20 bp, Artificial Sequence
  Synthetic
tgaaacccacacgctcaact

SEQ ID NO: 2180 - DNA, 20 bp, Artificial Sequence
  Synthetic
tgaaacccacacgctcaact

SEQ ID NO: 2181 - DNA, 20 bp, Artificial Sequence
  Synthetic
tgaaacccacacgctcaact

SEQ ID NO: 2182 - DNA, 20 bp, Artificial Sequence
  Synthetic
tgaaacccacacgctcaact

SEQ ID NO: 2183 - DNA, 20 bp, Artificial Sequence
  Synthetic
tgaaacccacacgctcaact

SEQ ID NO: 2184 - DNA, 20 bp, Artificial Sequence
  Synthetic
tgaaacccacacgctcaact

SEQ ID NO: 2185 - DNA, 20 bp, Artificial Sequence
  Synthetic
tgaaacccacacgctcaact

SEQ ID NO: 2186 - DNA, 20 bp, Artificial Sequence
  Synthetic
tgaaacccacacgctcaact

SEQ ID NO: 2187 - DNA, 20 bp, Artificial Sequence
  Synthetic
cattcttcggacaccagcct

SEQ ID NO: 2188 - DNA, 24 bp, Artificial Sequence
  Synthetic
acagcctgagagagatgaaggagt

SEQ ID NO: 2189 - DNA, 20 bp, Artificial Sequence
  Synthetic
ccctgctttctaccaagtgc

SEQ ID NO: 2190 - DNA, 20 bp, Artificial Sequence
  Synthetic
ccctgctttctaccaagtgc

SEQ ID NO: 2191 - DNA, 20 bp, Artificial Sequence
  Synthetic
ccctgctttctaccaagtgc

SEQ ID NO: 2192 - DNA, 20 bp, Artificial Sequence
  Synthetic
ccctgctttctaccaagtgc

SEQ ID NO: 2193 - DNA, 20 bp, Artificial Sequence
  Synthetic
atgggttcaactccacagcc

SEQ ID NO: 2194 - DNA, 20 bp, Artificial Sequence
  Synthetic
ggccctcccaagtttcctac

SEQ ID NO: 2195 - DNA, 20 bp, Artificial Sequence
  Synthetic
ggccctcccaagtttcctac

SEQ ID NO: 2196 - DNA, 20 bp, Artificial Sequence
  Synthetic
ggccctcccaagtttcctac

SEQ ID NO: 2197 - DNA, 20 bp, Artificial Sequence
  Synthetic
ggccctcccaagtttcctac

SEQ ID NO: 2198 - DNA, 20 bp, Artificial Sequence
  Synthetic
tgtgtatgctcagcacccag

SEQ ID NO: 2199 - DNA, 20 bp, Artificial Sequence
  Synthetic
tgtgtatgctcagcacccag

SEQ ID NO: 2200 - DNA, 20 bp, Artificial Sequence
  Synthetic
tgtgtatgctcagcacccag

SEQ ID NO: 2201 - DNA, 20 bp, Artificial Sequence
  Synthetic
tgtgtatgctcagcacccag

SEQ ID NO: 2202 - DNA, 20 bp, Artificial Sequence
  Synthetic
tgtgtatgctcagcacccag

SEQ ID NO: 2203 - DNA, 20 bp, Artificial Sequence
  Synthetic
ccctgaccctttgctccttt

SEQ ID NO: 2204 - DNA, 20 bp, Artificial Sequence
  Synthetic
ccctgaccctttgctccttt

SEQ ID NO: 2205 - DNA, 23 bp, Artificial Sequence
  Synthetic
agttttctacacgggctgccttt

SEQ ID NO: 2206 - DNA, 23 bp, Artificial Sequence
  Synthetic
acgtcttttgtccgcttcctgaa

SEQ ID NO: 2207 - DNA, 20 bp, Artificial Sequence
  Synthetic
gcgttgctgctagctctttc

SEQ ID NO: 2208 - DNA, 20 bp, Artificial Sequence
  Synthetic
gcgttgctgctagctctttc

SEQ ID NO: 2209 - DNA, 20 bp, Artificial Sequence
  Synthetic
gcgttgctgctagctctttc

SEQ ID NO: 2210 - DNA, 20 bp, Artificial Sequence
  Synthetic
gcgttgctgctagctctttc

SEQ ID NO: 2211 - DNA, 20 bp, Artificial Sequence
  Synthetic
tgagccctccattcctacct

SEQ ID NO: 2212 - DNA, 20 bp, Artificial Sequence
  Synthetic
tgagccctccattcctacct

SEQ ID NO: 2213 - DNA, 20 bp, Artificial Sequence
  Synthetic
gcacttggtagaaagcaggg

SEQ ID NO: 2214 - DNA, 20 bp, Artificial Sequence
  Synthetic
ggctgtggagttgaacccat

SEQ ID NO: 2215 - DNA, 20 bp, Artificial Sequence
  Synthetic
ggctgtggagttgaacccat

SEQ ID NO: 2216 - DNA, 20 bp, Artificial Sequence
  Synthetic
ggctgtggagttgaacccat

SEQ ID NO: 2217 - DNA, 20 bp, Artificial Sequence
  Synthetic
tccctccattcatcctccca

SEQ ID NO: 2218 - DNA, 20 bp, Artificial Sequence
  Synthetic
tccctccattcatcctccca

SEQ ID NO: 2219 - DNA, 20 bp, Artificial Sequence
  Synthetic
tccctccattcatcctccca

SEQ ID NO: 2220 - DNA, 20 bp, Artificial Sequence
  Synthetic
tccctccattcatcctccca

SEQ ID NO: 2221 - DNA, 20 bp, Artificial Sequence
  Synthetic
aggaagcggacaaaagacgt

SEQ ID NO: 2222 - DNA, 20 bp, Artificial Sequence
  Synthetic
aggaagcggacaaaagacgt

SEQ ID NO: 2223 - DNA, 20 bp, Artificial Sequence
  Synthetic
aggaagcggacaaaagacgt

SEQ ID NO: 2224 - DNA, 20 bp, Artificial Sequence
  Synthetic
aggaagcggacaaaagacgt

SEQ ID NO: 2225 - DNA, 20 bp, Artificial Sequence
  Synthetic
aggaagcggacaaaagacgt

SEQ ID NO: 2226 - DNA, 20 bp, Artificial Sequence
  Synthetic
aggaagcggacaaaagacgt

SEQ ID NO: 2227 - DNA, 20 bp, Artificial Sequence
  Synthetic
aggaagcggacaaaagacgt

SEQ ID NO: 2228 - DNA, 20 bp, Artificial Sequence
  Synthetic
gaaagagctagcagcaacgc

SEQ ID NO: 2229 - DNA, 20 bp, Artificial Sequence
  Synthetic
gaaagagctagcagcaacgc

SEQ ID NO: 2230 - DNA, 20 bp, Artificial Sequence
  Synthetic
aggaagcggacaaaagacgt

SEQ ID NO: 2231 - DNA, 20 bp, Artificial Sequence
  Synthetic
gaaagagctagcagcaacgc

SEQ ID NO: 2232 - DNA, 20 bp, Artificial Sequence
  Synthetic
gaaagagctagcagcaacgc

SEQ ID NO: 2233 - DNA, 20 bp, Artificial Sequence
  Synthetic
gaaagagctagcagcaacgc

SEQ ID NO: 2234 - DNA, 20 bp, Artificial Sequence
  Synthetic
gaaagagctagcagcaacgc

SEQ ID NO: 2235 - DNA, 20 bp, Artificial Sequence
  Synthetic
acaaggtctatgctccccca

SEQ ID NO: 2236 - DNA, 20 bp, Artificial Sequence
  Synthetic
acaaggtctatgctccccca

SEQ ID NO: 2237 - DNA, 20 bp, Artificial Sequence
  Synthetic
ccagctctgtgtgtggttgt

SEQ ID NO: 2238 - DNA, 20 bp, Artificial Sequence
  Synthetic
ccagctctgtgtgtggttgt

SEQ ID NO: 2239 - DNA, 20 bp, Artificial Sequence
  Synthetic
ccagctctgtgtgtggttgt

SEQ ID NO: 2240 - DNA, 20 bp, Artificial Sequence
  Synthetic
gcacgtggctcagtaacatg

SEQ ID NO: 2241 - DNA, 20 bp, Artificial Sequence
  Synthetic
acgtggctcagtaacatggg

SEQ ID NO: 2242 - DNA, 20 bp, Artificial Sequence
  Synthetic
acgtggctcagtaacatggg

SEQ ID NO: 2243 - DNA, 20 bp, Artificial Sequence
  Synthetic
acgtggctcagtaacatggg

SEQ ID NO: 2244 - DNA, 20 bp, Artificial Sequence
  Synthetic
acgtggctcagtaacatggg

SEQ ID NO: 2245 - DNA, 20 bp, Artificial Sequence
  Synthetic
acgtggctcagtaacatggg

SEQ ID NO: 2246 - DNA, 20 bp, Artificial Sequence
  Synthetic
acgtggctcagtaacatggg

SEQ ID NO: 2247 - DNA, 20 bp, Artificial Sequence
  Synthetic
gagcactccaaaatccccca

SEQ ID NO: 2248 - DNA, 20 bp, Artificial Sequence
  Synthetic
gagcactccaaaatccccca

SEQ ID NO: 2249 - DNA, 20 bp, Artificial Sequence
  Synthetic
gagcactccaaaatccccca

SEQ ID NO: 2250 - DNA, 20 bp, Artificial Sequence
  Synthetic
gagcactccaaaatccccca

SEQ ID NO: 2251 - DNA, 20 bp, Artificial Sequence
  Synthetic
gagcactccaaaatccccca

SEQ ID NO: 2252 - DNA, 20 bp, Artificial Sequence
  Synthetic
caggaagctgcaggtcttca

SEQ ID NO: 2253 - DNA, 20 bp, Artificial Sequence
  Synthetic
caggaagctgcaggtcttca

SEQ ID NO: 2254 - DNA, 20 bp, Artificial Sequence
  Synthetic
caggaagctgcaggtcttca

SEQ ID NO: 2255 - DNA, 20 bp, Artificial Sequence
  Synthetic
caggaagctgcaggtcttca

SEQ ID NO: 2256 - DNA, 20 bp, Artificial Sequence
  Synthetic
caggaagctgcaggtcttca

SEQ ID NO: 2257 - DNA, 20 bp, Artificial Sequence
  Synthetic
caggaagctgcaggtcttca

SEQ ID NO: 2258 - DNA, 20 bp, Artificial Sequence
  Synthetic
caggaagctgcaggtcttca

SEQ ID NO: 2259 - DNA, 20 bp, Artificial Sequence
  Synthetic
caggaagctgcaggtcttca

SEQ ID NO: 2260 - DNA, 20 bp, Artificial Sequence
  Synthetic
gggaaggagggacatggaga

SEQ ID NO: 2261 - DNA, 20 bp, Artificial Sequence
  Synthetic
gggaaggagggacatggaga

SEQ ID NO: 2262 - DNA, 20 bp, Artificial Sequence
  Synthetic
gactgagcctgggatttgct

SEQ ID NO: 2263 - DNA, 20 bp, Artificial Sequence
  Synthetic
gactgagcctgggatttgct

SEQ ID NO: 2264 - DNA, 20 bp, Artificial Sequence
  Synthetic
gactgagcctgggatttgct

SEQ ID NO: 2265 - DNA, 20 bp, Artificial Sequence
  Synthetic
gactgagcctgggatttgct

SEQ ID NO: 2266 - DNA, 20 bp, Artificial Sequence
  Synthetic
gatgggctcatggtctctcg

SEQ ID NO: 2267 - DNA, 20 bp, Artificial Sequence
  Synthetic
gatgggctcatggtctctcg

SEQ ID NO: 2268 - DNA, 20 bp, Artificial Sequence
  Synthetic
gatgggctcatggtctctcg

SEQ ID NO: 2269 - DNA, 20 bp, Artificial Sequence
  Synthetic
gatgggctcatggtctctcg

SEQ ID NO: 2270 - DNA, 20 bp, Artificial Sequence
  Synthetic
gatgggctcatggtctctcg

SEQ ID NO: 2271 - DNA, 20 bp, Artificial Sequence
  Synthetic
gatgggctcatggtctctcg

SEQ ID NO: 2272 - DNA, 20 bp, Artificial Sequence
  Synthetic
gatgggctcatggtctctcg

SEQ ID NO: 2273 - DNA, 20 bp, Artificial Sequence
  Synthetic
gtgctgttcccatgctttgg

SEQ ID NO: 2274 - DNA, 20 bp, Artificial Sequence
  Synthetic
gtgctgttcccatgctttgg

SEQ ID NO: 2275 - DNA, 20 bp, Artificial Sequence
  Synthetic
gtgctgttcccatgctttgg

SEQ ID NO: 2276 - DNA, 20 bp, Artificial Sequence
  Synthetic
gtgctgttcccatgctttgg

SEQ ID NO: 2277 - DNA, 20 bp, Artificial Sequence
  Synthetic
gtgctgttcccatgctttgg

SEQ ID NO: 2278 - DNA, 20 bp, Artificial Sequence
  Synthetic
gtgctgttcccatgctttgg

SEQ ID NO: 2279 - DNA, 20 bp, Artificial Sequence
  Synthetic
gtgctgttcccatgctttgg

SEQ ID NO: 2280 - DNA, 20 bp, Artificial Sequence
  Synthetic
gtgctgttcccatgctttgg

SEQ ID NO: 2281 - DNA, 20 bp, Artificial Sequence
  Synthetic
gtgctgttcccatgctttgg

SEQ ID NO: 2282 - DNA, 20 bp, Artificial Sequence
  Synthetic
gtgctgttcccatgctttgg

SEQ ID NO: 2283 - DNA, 20 bp, Artificial Sequence
  Synthetic
gtgctgttcccatgctttgg

SEQ ID NO: 2284 - DNA, 20 bp, Artificial Sequence
  Synthetic
ctgagttgctgcagttgctg

SEQ ID NO: 2285 - DNA, 20 bp, Artificial Sequence
  Synthetic
agtctgggctaatgggttgc

SEQ ID NO: 2286 - DNA, 20 bp, Artificial Sequence
  Synthetic
agtctgggctaatgggttgc

SEQ ID NO: 2287 - DNA, 20 bp, Artificial Sequence
  Synthetic
agtctgggctaatgggttgc

SEQ ID NO: 2288 - DNA, 20 bp, Artificial Sequence
  Synthetic
agtctgggctaatgggttgc

SEQ ID NO: 2289 - DNA, 20 bp, Artificial Sequence
  Synthetic
agtctgggctaatgggttgc

SEQ ID NO: 2290 - DNA, 20 bp, Artificial Sequence
  Synthetic
agtctgggctaatgggttgc

SEQ ID NO: 2291 - DNA, 20 bp, Artificial Sequence
  Synthetic
agtctgggctaatgggttgc

SEQ ID NO: 2292 - DNA, 20 bp, Artificial Sequence
  Synthetic
agtctgggctaatgggttgc

SEQ ID NO: 2293 - DNA, 20 bp, Artificial Sequence
  Synthetic
cctgctttcttgtgcctcct

SEQ ID NO: 2294 - DNA, 20 bp, Artificial Sequence
  Synthetic
cctgctttcttgtgcctcct

SEQ ID NO: 2295 - DNA, 20 bp, Artificial Sequence
  Synthetic
gttgtgtgtctggtctggct

SEQ ID NO: 2296 - DNA, 20 bp, Artificial Sequence
  Synthetic
gttgtgtgtctggtctggct

SEQ ID NO: 2297 - DNA, 20 bp, Artificial Sequence
  Synthetic
gttgtgtgtctggtctggct

SEQ ID NO: 2298 - DNA, 20 bp, Artificial Sequence
  Synthetic
tgtgtgtctgatgtgtgggg

SEQ ID NO: 2299 - DNA, 20 bp, Artificial Sequence
  Synthetic
catgtggatgtctgggctgt

SEQ ID NO: 2300 - DNA, 20 bp, Artificial Sequence
  Synthetic
catgtggatgtctgggctgt

SEQ ID NO: 2301 - DNA, 20 bp, Artificial Sequence
  Synthetic
catgtggatgtctgggctgt

SEQ ID NO: 2302 - DNA, 20 bp, Artificial Sequence
  Synthetic
tcttggctctcagcaccttg

SEQ ID NO: 2303 - DNA, 20 bp, Artificial Sequence
  Synthetic
tcttggctctcagcaccttg

SEQ ID NO: 2304 - DNA, 20 bp, Artificial Sequence
  Synthetic
tcttggctctcagcaccttg

SEQ ID NO: 2305 - DNA, 20 bp, Artificial Sequence
  Synthetic
tcttggctctcagcaccttg

SEQ ID NO: 2306 - DNA, 20 bp, Artificial Sequence
  Synthetic
tcttggctctcagcaccttg

SEQ ID NO: 2307 - DNA, 20 bp, Artificial Sequence
  Synthetic
tcttggctctcagcaccttg

SEQ ID NO: 2308 - DNA, 20 bp, Artificial Sequence
  Synthetic
ctttatgtcccggggaggtg

SEQ ID NO: 2309 - DNA, 20 bp, Artificial Sequence
  Synthetic
ctttatgtcccggggaggtg

SEQ ID NO: 2310 - DNA, 20 bp, Artificial Sequence
  Synthetic
ctttatgtcccggggaggtg

SEQ ID NO: 2311 - DNA, 20 bp, Artificial Sequence
  Synthetic
ctttatgtcccggggaggtg

SEQ ID NO: 2312 - DNA, 20 bp, Artificial Sequence
  Synthetic
ctttatgtcccggggaggtg

SEQ ID NO: 2313 - DNA, 20 bp, Artificial Sequence
  Synthetic
ctttatgtcccggggaggtg

SEQ ID NO: 2314 - DNA, 20 bp, Artificial Sequence
  Synthetic
gtcaaaccctcacaggctca

SEQ ID NO: 2315 - DNA, 20 bp, Artificial Sequence
  Synthetic
gtcaaaccctcacaggctca

SEQ ID NO: 2316 - DNA, 20 bp, Artificial Sequence
  Synthetic
gtcaaaccctcacaggctca

SEQ ID NO: 2317 - DNA, 20 bp, Artificial Sequence
  Synthetic
cagtgccagcaagactagct

SEQ ID NO: 2318 - DNA, 20 bp, Artificial Sequence
  Synthetic
cagtgccagcaagactagct

SEQ ID NO: 2319 - DNA, 20 bp, Artificial Sequence
  Synthetic
tgcgcctggctaatttgttg

SEQ ID NO: 2320 - DNA, 20 bp, Artificial Sequence
  Synthetic
tgcgcctggctaatttgttg

SEQ ID NO: 2321 - DNA, 20 bp, Artificial Sequence
  Synthetic
tccctgtctttcaaagcgct

SEQ ID NO: 2322 - DNA, 20 bp, Artificial Sequence
  Synthetic
ccctgccccttgttactttc

SEQ ID NO: 2323 - DNA, 20 bp, Artificial Sequence
  Synthetic
ccctgccccttgttactttc

SEQ ID NO: 2324 - DNA, 20 bp, Artificial Sequence
  Synthetic
ccctgccccttgttactttc

SEQ ID NO: 2325 - DNA, 20 bp, Artificial Sequence
  Synthetic
ccctgccccttgttactttc

SEQ ID NO: 2326 - DNA, 20 bp, Artificial Sequence
  Synthetic
ccctgccccttgttactttc

SEQ ID NO: 2327 - DNA, 20 bp, Artificial Sequence
  Synthetic
ccctgccccttgttactttc

SEQ ID NO: 2328 - DNA, 20 bp, Artificial Sequence
  Synthetic
ccctgccccttgttactttc

SEQ ID NO: 2329 - DNA, 20 bp, Artificial Sequence
  Synthetic
ccctgccccttgttactttc

SEQ ID NO: 2330 - DNA, 20 bp, Artificial Sequence
  Synthetic
ccctgccccttgttactttc

SEQ ID NO: 2331 - DNA, 20 bp, Artificial Sequence
  Synthetic
ccctgccccttgttactttc

SEQ ID NO: 2332 - DNA, 20 bp, Artificial Sequence
  Synthetic
ccctgccccttgttactttc

SEQ ID NO: 2333 - DNA, 20 bp, Artificial Sequence
  Synthetic
ccctgccccttgttactttc

SEQ ID NO: 2334 - DNA, 20 bp, Artificial Sequence
  Synthetic
ccctgccccttgttactttc

SEQ ID NO: 2335 - DNA, 20 bp, Artificial Sequence
  Synthetic
ccctgccccttgttactttc

SEQ ID NO: 2336 - DNA, 20 bp, Artificial Sequence
  Synthetic
ccctgccccttgttactttc

SEQ ID NO: 2337 - DNA, 20 bp, Artificial Sequence
  Synthetic
ccctgccccttgttactttc

SEQ ID NO: 2338 - DNA, 20 bp, Artificial Sequence
  Synthetic
ccctgccccttgttactttc

SEQ ID NO: 2339 - DNA, 20 bp, Artificial Sequence
  Synthetic
ccctgccccttgttactttc

SEQ ID NO: 2340 - DNA, 20 bp, Artificial Sequence
  Synthetic
ccctgccccttgttactttc

SEQ ID NO: 2341 - DNA, 20 bp, Artificial Sequence
  Synthetic
ccctgccccttgttactttc

SEQ ID NO: 2342 - DNA, 20 bp, Artificial Sequence
  Synthetic
ccctgccccttgttactttc

SEQ ID NO: 2343 - DNA, 20 bp, Artificial Sequence
  Synthetic
ccctgccccttgttactttc

SEQ ID NO: 2344 - DNA, 20 bp, Artificial Sequence
  Synthetic
ccctgccccttgttactttc

SEQ ID NO: 2345 - DNA, 20 bp, Artificial Sequence
  Synthetic
ccctgccccttgttactttc

SEQ ID NO: 2346 - DNA, 20 bp, Artificial Sequence
  Synthetic
ccctgccccttgttactttc

SEQ ID NO: 2347 - DNA, 20 bp, Artificial Sequence
  Synthetic
ccctgccccttgttactttc

SEQ ID NO: 2348 - DNA, 20 bp, Artificial Sequence
  Synthetic
ccctgccccttgttactttc

SEQ ID NO: 2349 - DNA, 20 bp, Artificial Sequence
  Synthetic
ccctgccccttgttactttc

SEQ ID NO: 2350 - DNA, 20 bp, Artificial Sequence
  Synthetic
ccctgccccttgttactttc

SEQ ID NO: 2351 - DNA, 20 bp, Artificial Sequence
  Synthetic
ccctgccccttgttactttc

SEQ ID NO: 2352 - DNA, 20 bp, Artificial Sequence
  Synthetic
ccctgccccttgttactttc

SEQ ID NO: 2353 - DNA, 20 bp, Artificial Sequence
  Synthetic
ccctgccccttgttactttc

SEQ ID NO: 2354 - DNA, 20 bp, Artificial Sequence
  Synthetic
ccctgccccttgttactttc

SEQ ID NO: 2355 - DNA, 20 bp, Artificial Sequence
  Synthetic
ccctgccccttgttactttc

SEQ ID NO: 2356 - DNA, 20 bp, Artificial Sequence
  Synthetic
ccctgccccttgttactttc

SEQ ID NO: 2357 - DNA, 20 bp, Artificial Sequence
  Synthetic
ccctgccccttgttactttc

SEQ ID NO: 2358 - DNA, 20 bp, Artificial Sequence
  Synthetic
ccctgccccttgttactttc

SEQ ID NO: 2359 - DNA, 20 bp, Artificial Sequence
  Synthetic
ccctgccccttgttactttc

SEQ ID NO: 2360 - DNA, 20 bp, Artificial Sequence
  Synthetic
ccctgccccttgttactttc

SEQ ID NO: 2361 - DNA, 20 bp, Artificial Sequence
  Synthetic
ccctgccccttgttactttc

SEQ ID NO: 2362 - DNA, 20 bp, Artificial Sequence
  Synthetic
ccctgccccttgttactttc

SEQ ID NO: 2363 - DNA, 20 bp, Artificial Sequence
  Synthetic
ccctgccccttgttactttc

SEQ ID NO: 2364 - DNA, 20 bp, Artificial Sequence
  Synthetic
ccctgccccttgttactttc

SEQ ID NO: 2365 - DNA, 20 bp, Artificial Sequence
  Synthetic
ccctgccccttgttactttc

SEQ ID NO: 2366 - DNA, 20 bp, Artificial Sequence
  Synthetic
ccctgccccttgttactttc

SEQ ID NO: 2367 - DNA, 20 bp, Artificial Sequence
  Synthetic
ccctgccccttgttactttc

SEQ ID NO: 2368 - DNA, 20 bp, Artificial Sequence
  Synthetic
ccctgccccttgttactttc

SEQ ID NO: 2369 - DNA, 20 bp, Artificial Sequence
  Synthetic
ccctgccccttgttactttc

SEQ ID NO: 2370 - DNA, 20 bp, Artificial Sequence
  Synthetic
ccctgccccttgttactttc

SEQ ID NO: 2371 - DNA, 20 bp, Artificial Sequence
  Synthetic
ccctgccccttgttactttc

SEQ ID NO: 2372 - DNA, 20 bp, Artificial Sequence
  Synthetic
ccctgccccttgttactttc

SEQ ID NO: 2373 - DNA, 20 bp, Artificial Sequence
  Synthetic
ccctgccccttgttactttc

SEQ ID NO: 2374 - DNA, 20 bp, Artificial Sequence
  Synthetic
gaccctttgctcctttcaca

SEQ ID NO: 2375 - DNA, 20 bp, Artificial Sequence
  Synthetic
gaccctttgctcctttcaca

SEQ ID NO: 2376 - DNA, 20 bp, Artificial Sequence
  Synthetic
gaccctttgctcctttcaca

SEQ ID NO: 2377 - DNA, 20 bp, Artificial Sequence
  Synthetic
gaccctttgctcctttcaca

SEQ ID NO: 2378 - DNA, 20 bp, Artificial Sequence
  Synthetic
gaccctttgctcctttcaca

SEQ ID NO: 2379 - DNA, 20 bp, Artificial Sequence
  Synthetic
gaccctttgctcctttcaca

SEQ ID NO: 2380 - DNA, 20 bp, Artificial Sequence
  Synthetic
gaccctttgctcctttcaca

SEQ ID NO: 2381 - DNA, 20 bp, Artificial Sequence
  Synthetic
gaccctttgctcctttcaca

SEQ ID NO: 2382 - DNA, 20 bp, Artificial Sequence
  Synthetic
gaccctttgctcctttcaca

SEQ ID NO: 2383 - DNA, 20 bp, Artificial Sequence
  Synthetic
gaccctttgctcctttcaca

SEQ ID NO: 2384 - DNA, 20 bp, Artificial Sequence
  Synthetic
gaccctttgctcctttcaca

SEQ ID NO: 2385 - DNA, 20 bp, Artificial Sequence
  Synthetic
gaccctttgctcctttcaca

SEQ ID NO: 2386 - DNA, 20 bp, Artificial Sequence
  Synthetic
gaccctttgctcctttcaca

SEQ ID NO: 2387 - DNA, 20 bp, Artificial Sequence
  Synthetic
gaccctttgctcctttcaca

SEQ ID NO: 2388 - DNA, 20 bp, Artificial Sequence
  Synthetic
gaccctttgctcctttcaca

SEQ ID NO: 2389 - DNA, 20 bp, Artificial Sequence
  Synthetic
gaccctttgctcctttcaca

SEQ ID NO: 2390 - DNA, 20 bp, Artificial Sequence
  Synthetic
gaccctttgctcctttcaca

SEQ ID NO: 2391 - DNA, 20 bp, Artificial Sequence
  Synthetic
gaccctttgctcctttcaca

SEQ ID NO: 2392 - DNA, 20 bp, Artificial Sequence
  Synthetic
gaccctttgctcctttcaca

SEQ ID NO: 2393 - DNA, 20 bp, Artificial Sequence
  Synthetic
gaccctttgctcctttcaca

SEQ ID NO: 2394 - DNA, 20 bp, Artificial Sequence
  Synthetic
gaccctttgctcctttcaca

SEQ ID NO: 2395 - DNA, 20 bp, Artificial Sequence
  Synthetic
gaccctttgctcctttcaca

SEQ ID NO: 2396 - DNA, 21 bp, Artificial Sequence
  Synthetic
gagagctggagttcatgaagg

SEQ ID NO: 2397 - DNA, 21 bp, Artificial Sequence
  Synthetic
gagagctggagttcatgaagg

SEQ ID NO: 2398 - DNA, 21 bp, Artificial Sequence
  Synthetic
gagagctggagttcatgaagg

SEQ ID NO: 2399 - DNA, 21 bp, Artificial Sequence
  Synthetic
gagagctggagttcatgaagg

SEQ ID NO: 2400 - DNA, 21 bp, Artificial Sequence
  Synthetic
gagagctggagttcatgaagg

SEQ ID NO: 2401 - DNA, 21 bp, Artificial Sequence
  Synthetic
gagagctggagttcatgaagg

SEQ ID NO: 2402 - DNA, 21 bp, Artificial Sequence
  Synthetic
gagagctggagttcatgaagg

SEQ ID NO: 2403 - DNA, 21 bp, Artificial Sequence
  Synthetic
gagagctggagttcatgaagg

SEQ ID NO: 2404 - DNA, 21 bp, Artificial Sequence
  Synthetic
gagagctggagttcatgaagg

SEQ ID NO: 2405 - DNA, 21 bp, Artificial Sequence
  Synthetic
gagagctggagttcatgaagg

SEQ ID NO: 2406 - DNA, 21 bp, Artificial Sequence
  Synthetic
gagagctggagttcatgaagg

SEQ ID NO: 2407 - DNA, 21 bp, Artificial Sequence
  Synthetic
gagagctggagttcatgaagg

SEQ ID NO: 2408 - DNA, 21 bp, Artificial Sequence
  Synthetic
gagagctggagttcatgaagg

SEQ ID NO: 2409 - DNA, 21 bp, Artificial Sequence
  Synthetic
gagagctggagttcatgaagg

SEQ ID NO: 2410 - DNA, 21 bp, Artificial Sequence
  Synthetic
gagagctggagttcatgaagg

SEQ ID NO: 2411 - DNA, 21 bp, Artificial Sequence
  Synthetic
gagagctggagttcatgaagg

SEQ ID NO: 2412 - DNA, 21 bp, Artificial Sequence
  Synthetic
gagagctggagttcatgaagg

SEQ ID NO: 2413 - DNA, 20 bp, Artificial Sequence
  Synthetic
ggtgctgttcccatgctttg

SEQ ID NO: 2414 - DNA, 20 bp, Artificial Sequence
  Synthetic
ggtgctgttcccatgctttg

SEQ ID NO: 2415 - DNA, 20 bp, Artificial Sequence
  Synthetic
ggtgctgttcccatgctttg

SEQ ID NO: 2416 - DNA, 20 bp, Artificial Sequence
  Synthetic
ggtgctgttcccatgctttg

SEQ ID NO: 2417 - DNA, 20 bp, Artificial Sequence
  Synthetic
ggtgctgttcccatgctttg

SEQ ID NO: 2418 - DNA, 20 bp, Artificial Sequence
  Synthetic
ggtgctgttcccatgctttg

SEQ ID NO: 2419 - DNA, 20 bp, Artificial Sequence
  Synthetic
ggtgctgttcccatgctttg

SEQ ID NO: 2420 - DNA, 20 bp, Artificial Sequence
  Synthetic
ggtgctgttcccatgctttg

SEQ ID NO: 2421 - DNA, 20 bp, Artificial Sequence
  Synthetic
ggtgctgttcccatgctttg

SEQ ID NO: 2422 - DNA, 20 bp, Artificial Sequence
  Synthetic
ggtgctgttcccatgctttg

SEQ ID NO: 2423 - DNA, 20 bp, Artificial Sequence
  Synthetic
ggtgctgttcccatgctttg

SEQ ID NO: 2424 - DNA, 20 bp, Artificial Sequence
  Synthetic
ggtgctgttcccatgctttg

SEQ ID NO: 2425 - DNA, 20 bp, Artificial Sequence
  Synthetic
ggtgctgttcccatgctttg

SEQ ID NO: 2426 - DNA, 20 bp, Artificial Sequence
  Synthetic
ggtgctgttcccatgctttg

SEQ ID NO: 2427 - DNA, 20 bp, Artificial Sequence
  Synthetic
ggtgctgttcccatgctttg

SEQ ID NO: 2428 - DNA, 20 bp, Artificial Sequence
  Synthetic
ggtgctgttcccatgctttg

SEQ ID NO: 2429 - DNA, 20 bp, Artificial Sequence
  Synthetic
ggtgctgttcccatgctttg

SEQ ID NO: 2430 - DNA, 20 bp, Artificial Sequence
  Synthetic
ggtgctgttcccatgctttg

SEQ ID NO: 2431 - DNA, 20 bp, Artificial Sequence
  Synthetic
ggtgctgttcccatgctttg

SEQ ID NO: 2432 - DNA, 20 bp, Artificial Sequence
  Synthetic
ggtgctgttcccatgctttg

SEQ ID NO: 2433 - DNA, 20 bp, Artificial Sequence
  Synthetic
ggtgctgttcccatgctttg

SEQ ID NO: 2434 - DNA, 20 bp, Artificial Sequence
  Synthetic
ggtgctgttcccatgctttg

SEQ ID NO: 2435 - DNA, 20 bp, Artificial Sequence
  Synthetic
ggtgctgttcccatgctttg

SEQ ID NO: 2436 - DNA, 20 bp, Artificial Sequence
  Synthetic
ggtgctgttcccatgctttg

SEQ ID NO: 2437 - DNA, 20 bp, Artificial Sequence
  Synthetic
ggtgctgttcccatgctttg

SEQ ID NO: 2438 - DNA, 20 bp, Artificial Sequence
  Synthetic
ggtgctgttcccatgctttg

SEQ ID NO: 2439 - DNA, 20 bp, Artificial Sequence
  Synthetic
ggtgctgttcccatgctttg

SEQ ID NO: 2440 - DNA, 20 bp, Artificial Sequence
  Synthetic
ggtgctgttcccatgctttg

SEQ ID NO: 2441 - DNA, 20 bp, Artificial Sequence
  Synthetic
ggtgctgttcccatgctttg

SEQ ID NO: 2442 - DNA, 20 bp, Artificial Sequence
  Synthetic
ggtgctgttcccatgctttg

SEQ ID NO: 2443 - DNA, 20 bp, Artificial Sequence
  Synthetic
ggtgctgttcccatgctttg

SEQ ID NO: 2444 - DNA, 20 bp, Artificial Sequence
  Synthetic
ggtgctgttcccatgctttg

SEQ ID NO: 2445 - DNA, 20 bp, Artificial Sequence
  Synthetic
ggtgctgttcccatgctttg

SEQ ID NO: 2446 - DNA, 20 bp, Artificial Sequence
  Synthetic
ggtgctgttcccatgctttg

SEQ ID NO: 2447 - DNA, 20 bp, Artificial Sequence
  Synthetic
ggtgctgttcccatgctttg

SEQ ID NO: 2448 - DNA, 20 bp, Artificial Sequence
  Synthetic
ggtgctgttcccatgctttg

SEQ ID NO: 2449 - DNA, 20 bp, Artificial Sequence
  Synthetic
ggtgctgttcccatgctttg

SEQ ID NO: 2450 - DNA, 20 bp, Artificial Sequence
  Synthetic
ggtgctgttcccatgctttg

SEQ ID NO: 2451 - DNA, 20 bp, Artificial Sequence
  Synthetic
ggtgctgttcccatgctttg

SEQ ID NO: 2452 - DNA, 20 bp, Artificial Sequence
  Synthetic
ggtgctgttcccatgctttg

SEQ ID NO: 2453 - DNA, 20 bp, Artificial Sequence
  Synthetic
ggtgctgttcccatgctttg

SEQ ID NO: 2454 - DNA, 20 bp, Artificial Sequence
  Synthetic
ggtgctgttcccatgctttg

SEQ ID NO: 2455 - DNA, 20 bp, Artificial Sequence
  Synthetic
ggtgctgttcccatgctttg

SEQ ID NO: 2456 - DNA, 20 bp, Artificial Sequence
  Synthetic
ggtgctgttcccatgctttg

SEQ ID NO: 2457 - DNA, 20 bp, Artificial Sequence
  Synthetic
ggtgctgttcccatgctttg

SEQ ID NO: 2458 - DNA, 20 bp, Artificial Sequence
  Synthetic
ggtgctgttcccatgctttg

SEQ ID NO: 2459 - DNA, 20 bp, Artificial Sequence
  Synthetic
ggtgctgttcccatgctttg

SEQ ID NO: 2460 - DNA, 20 bp, Artificial Sequence
  Synthetic
ggtgctgttcccatgctttg

SEQ ID NO: 2461 - DNA, 20 bp, Artificial Sequence
  Synthetic
ggtgctgttcccatgctttg

SEQ ID NO: 2462 - DNA, 20 bp, Artificial Sequence
  Synthetic
ggtgctgttcccatgctttg

SEQ ID NO: 2463 - DNA, 20 bp, Artificial Sequence
  Synthetic
ggtgctgttcccatgctttg

SEQ ID NO: 2464 - DNA, 20 bp, Artificial Sequence
  Synthetic
ggtgctgttcccatgctttg

SEQ ID NO: 2465 - DNA, 20 bp, Artificial Sequence
  Synthetic
ggtgctgttcccatgctttg

SEQ ID NO: 2466 - DNA, 20 bp, Artificial Sequence
  Synthetic
ggtgctgttcccatgctttg

SEQ ID NO: 2467 - DNA, 20 bp, Artificial Sequence
  Synthetic
ggtgctgttcccatgctttg

SEQ ID NO: 2468 - DNA, 20 bp, Artificial Sequence
  Synthetic
ggtgctgttcccatgctttg

SEQ ID NO: 2469 - DNA, 20 bp, Artificial Sequence
  Synthetic
ggtgctgttcccatgctttg

SEQ ID NO: 2470 - DNA, 20 bp, Artificial Sequence
  Synthetic
ggtgctgttcccatgctttg

SEQ ID NO: 2471 - DNA, 20 bp, Artificial Sequence
  Synthetic
ggtgctgttcccatgctttg

SEQ ID NO: 2472 - DNA, 20 bp, Artificial Sequence
  Synthetic
ggtgctgttcccatgctttg

SEQ ID NO: 2473 - DNA, 20 bp, Artificial Sequence
  Synthetic
ggtgctgttcccatgctttg

SEQ ID NO: 2474 - DNA, 20 bp, Artificial Sequence
  Synthetic
ggtgctgttcccatgctttg

SEQ ID NO: 2475 - DNA, 20 bp, Artificial Sequence
  Synthetic
ggtgctgttcccatgctttg

SEQ ID NO: 2476 - DNA, 20 bp, Artificial Sequence
  Synthetic
ggtgctgttcccatgctttg

SEQ ID NO: 2477 - DNA, 20 bp, Artificial Sequence
  Synthetic
ggtgctgttcccatgctttg

SEQ ID NO: 2478 - DNA, 20 bp, Artificial Sequence
  Synthetic
ggtgctgttcccatgctttg

SEQ ID NO: 2479 - DNA, 20 bp, Artificial Sequence
  Synthetic
ggtgctgttcccatgctttg

SEQ ID NO: 2480 - DNA, 20 bp, Artificial Sequence
  Synthetic
ggtgctgttcccatgctttg

SEQ ID NO: 2481 - DNA, 20 bp, Artificial Sequence
  Synthetic
ggtgctgttcccatgctttg

SEQ ID NO: 2482 - DNA, 20 bp, Artificial Sequence
  Synthetic
ggtgctgttcccatgctttg

SEQ ID NO: 2483 - DNA, 20 bp, Artificial Sequence
  Synthetic
ggtgctgttcccatgctttg

SEQ ID NO: 2484 - DNA, 20 bp, Artificial Sequence
  Synthetic
ggtgctgttcccatgctttg

SEQ ID NO: 2485 - DNA, 20 bp, Artificial Sequence
  Synthetic
ggtgctgttcccatgctttg

SEQ ID NO: 2486 - DNA, 20 bp, Artificial Sequence
  Synthetic
ggtgctgttcccatgctttg

SEQ ID NO: 2487 - DNA, 20 bp, Artificial Sequence
  Synthetic
ggtgctgttcccatgctttg

SEQ ID NO: 2488 - DNA, 20 bp, Artificial Sequence
  Synthetic
ggtgctgttcccatgctttg

SEQ ID NO: 2489 - DNA, 20 bp, Artificial Sequence
  Synthetic
ggtgctgttcccatgctttg

SEQ ID NO: 2490 - DNA, 20 bp, Artificial Sequence
  Synthetic
ggtgctgttcccatgctttg

SEQ ID NO: 2491 - DNA, 20 bp, Artificial Sequence
  Synthetic
ggtgctgttcccatgctttg

SEQ ID NO: 2492 - DNA, 20 bp, Artificial Sequence
  Synthetic
ggtgctgttcccatgctttg

SEQ ID NO: 2493 - DNA, 20 bp, Artificial Sequence
  Synthetic
ggtgctgttcccatgctttg

SEQ ID NO: 2494 - DNA, 20 bp, Artificial Sequence
  Synthetic
ggtgctgttcccatgctttg

SEQ ID NO: 2495 - DNA, 20 bp, Artificial Sequence
  Synthetic
ggtgctgttcccatgctttg

SEQ ID NO: 2496 - DNA, 20 bp, Artificial Sequence
  Synthetic
ggtgctgttcccatgctttg

SEQ ID NO: 2497 - DNA, 20 bp, Artificial Sequence
  Synthetic
ggtgctgttcccatgctttg

SEQ ID NO: 2498 - DNA, 20 bp, Artificial Sequence
  Synthetic
ggtgctgttcccatgctttg

SEQ ID NO: 2499 - DNA, 20 bp, Artificial Sequence
  Synthetic
ctggagggaagggttagctc

SEQ ID NO: 2500 - DNA, 20 bp, Artificial Sequence
  Synthetic
ctggagggaagggttagctc

SEQ ID NO: 2501 - DNA, 20 bp, Artificial Sequence
  Synthetic
ctggagggaagggttagctc

SEQ ID NO: 2502 - DNA, 20 bp, Artificial Sequence
  Synthetic
ctggagggaagggttagctc

SEQ ID NO: 2503 - DNA, 20 bp, Artificial Sequence
  Synthetic
ctggagggaagggttagctc

SEQ ID NO: 2504 - DNA, 20 bp, Artificial Sequence
  Synthetic
ctggagggaagggttagctc

SEQ ID NO: 2505 - DNA, 20 bp, Artificial Sequence
  Synthetic
ctggagggaagggttagctc

SEQ ID NO: 2506 - DNA, 20 bp, Artificial Sequence
  Synthetic
ctggagggaagggttagctc

SEQ ID NO: 2507 - DNA, 20 bp, Artificial Sequence
  Synthetic
ctggagggaagggttagctc

SEQ ID NO: 2508 - DNA, 20 bp, Artificial Sequence
  Synthetic
ttgagcgtgtgggtttcaag

SEQ ID NO: 2509 - DNA, 20 bp, Artificial Sequence
  Synthetic
ttgagcgtgtgggtttcaag

SEQ ID NO: 2510 - DNA, 20 bp, Artificial Sequence
  Synthetic
ttgagcgtgtgggtttcaag

SEQ ID NO: 2511 - DNA, 20 bp, Artificial Sequence
  Synthetic
ttgagcgtgtgggtttcaag

SEQ ID NO: 2512 - DNA, 20 bp, Artificial Sequence
  Synthetic
ttgagcgtgtgggtttcaag

SEQ ID NO: 2513 - DNA, 20 bp, Artificial Sequence
  Synthetic
ttgagcgtgtgggtttcaag

SEQ ID NO: 2514 - DNA, 20 bp, Artificial Sequence
  Synthetic
ttgagcgtgtgggtttcaag

SEQ ID NO: 2515 - DNA, 20 bp, Artificial Sequence
  Synthetic
ttgagcgtgtgggtttcaag

SEQ ID NO: 2516 - DNA, 20 bp, Artificial Sequence
  Synthetic
ttgagcgtgtgggtttcaag

SEQ ID NO: 2517 - DNA, 20 bp, Artificial Sequence
  Synthetic
ttgagcgtgtgggtttcaag

SEQ ID NO: 2518 - DNA, 20 bp, Artificial Sequence
  Synthetic
ttgagcgtgtgggtttcaag

SEQ ID NO: 2519 - DNA, 20 bp, Artificial Sequence
  Synthetic
ttgagcgtgtgggtttcaag

SEQ ID NO: 2520 - DNA, 20 bp, Artificial Sequence
  Synthetic
ttgagcgtgtgggtttcaag

SEQ ID NO: 2521 - DNA, 20 bp, Artificial Sequence
  Synthetic
ttgagcgtgtgggtttcaag

SEQ ID NO: 2522 - DNA, 20 bp, Artificial Sequence
  Synthetic
ttgagcgtgtgggtttcaag

SEQ ID NO: 2523 - DNA, 20 bp, Artificial Sequence
  Synthetic
ttgagcgtgtgggtttcaag

SEQ ID NO: 2524 - DNA, 20 bp, Artificial Sequence
  Synthetic
ttgagcgtgtgggtttcaag

SEQ ID NO: 2525 - DNA, 20 bp, Artificial Sequence
  Synthetic
ttgagcgtgtgggtttcaag

SEQ ID NO: 2526 - DNA, 20 bp, Artificial Sequence
  Synthetic
ttgagcgtgtgggtttcaag

SEQ ID NO: 2527 - DNA, 20 bp, Artificial Sequence
  Synthetic
ttgagcgtgtgggtttcaag

SEQ ID NO: 2528 - DNA, 20 bp, Artificial Sequence
  Synthetic
ttgagcgtgtgggtttcaag

SEQ ID NO: 2529 - DNA, 20 bp, Artificial Sequence
  Synthetic
ttgagcgtgtgggtttcaag

SEQ ID NO: 2530 - DNA, 20 bp, Artificial Sequence
  Synthetic
ttgagcgtgtgggtttcaag

SEQ ID NO: 2531 - DNA, 20 bp, Artificial Sequence
  Synthetic
ttgagcgtgtgggtttcaag

SEQ ID NO: 2532 - DNA, 20 bp, Artificial Sequence
  Synthetic
ttgagcgtgtgggtttcaag

SEQ ID NO: 2533 - DNA, 20 bp, Artificial Sequence
  Synthetic
ttgagcgtgtgggtttcaag

SEQ ID NO: 2534 - DNA, 20 bp, Artificial Sequence
  Synthetic
ttgagcgtgtgggtttcaag

SEQ ID NO: 2535 - DNA, 20 bp, Artificial Sequence
  Synthetic
ttgagcgtgtgggtttcaag

SEQ ID NO: 2536 - DNA, 20 bp, Artificial Sequence
  Synthetic
ttgagcgtgtgggtttcaag

SEQ ID NO: 2537 - DNA, 20 bp, Artificial Sequence
  Synthetic
ttgagcgtgtgggtttcaag

SEQ ID NO: 2538 - DNA, 20 bp, Artificial Sequence
  Synthetic
ttgagcgtgtgggtttcaag

SEQ ID NO: 2539 - DNA, 20 bp, Artificial Sequence
  Synthetic
ttgagcgtgtgggtttcaag

SEQ ID NO: 2540 - DNA, 20 bp, Artificial Sequence
  Synthetic
ttgagcgtgtgggtttcaag

SEQ ID NO: 2541 - DNA, 20 bp, Artificial Sequence
  Synthetic
ttgagcgtgtgggtttcaag

SEQ ID NO: 2542 - DNA, 20 bp, Artificial Sequence
  Synthetic
ttgagcgtgtgggtttcaag

SEQ ID NO: 2543 - DNA, 20 bp, Artificial Sequence
  Synthetic
ttgagcgtgtgggtttcaag

SEQ ID NO: 2544 - DNA, 20 bp, Artificial Sequence
  Synthetic
ttgagcgtgtgggtttcaag

SEQ ID NO: 2545 - DNA, 20 bp, Artificial Sequence
  Synthetic
ttgagcgtgtgggtttcaag

SEQ ID NO: 2546 - DNA, 20 bp, Artificial Sequence
  Synthetic
ttgagcgtgtgggtttcaag

SEQ ID NO: 2547 - DNA, 20 bp, Artificial Sequence
  Synthetic
ttgagcgtgtgggtttcaag

SEQ ID NO: 2548 - DNA, 20 bp, Artificial Sequence
  Synthetic
ttgagcgtgtgggtttcaag

SEQ ID NO: 2549 - DNA, 20 bp, Artificial Sequence
  Synthetic
ttgagcgtgtgggtttcaag

SEQ ID NO: 2550 - DNA, 20 bp, Artificial Sequence
  Synthetic
ttgagcgtgtgggtttcaag

SEQ ID NO: 2551 - DNA, 20 bp, Artificial Sequence
  Synthetic
ttgagcgtgtgggtttcaag

SEQ ID NO: 2552 - DNA, 20 bp, Artificial Sequence
  Synthetic
ttgagcgtgtgggtttcaag

SEQ ID NO: 2553 - DNA, 20 bp, Artificial Sequence
  Synthetic
ttgagcgtgtgggtttcaag

SEQ ID NO: 2554 - DNA, 20 bp, Artificial Sequence
  Synthetic
ttgagcgtgtgggtttcaag

SEQ ID NO: 2555 - DNA, 20 bp, Artificial Sequence
  Synthetic
ttgagcgtgtgggtttcaag

SEQ ID NO: 2556 - DNA, 20 bp, Artificial Sequence
  Synthetic
ttgagcgtgtgggtttcaag

SEQ ID NO: 2557 - DNA, 20 bp, Artificial Sequence
  Synthetic
ttgagcgtgtgggtttcaag

SEQ ID NO: 2558 - DNA, 20 bp, Artificial Sequence
  Synthetic
ttgagcgtgtgggtttcaag

SEQ ID NO: 2559 - DNA, 20 bp, Artificial Sequence
  Synthetic
ttgagcgtgtgggtttcaag

SEQ ID NO: 2560 - DNA, 20 bp, Artificial Sequence
  Synthetic
gctcctttgttccgcataag

SEQ ID NO: 2561 - DNA, 20 bp, Artificial Sequence
  Synthetic
gctcctttgttccgcataag

SEQ ID NO: 2562 - DNA, 20 bp, Artificial Sequence
  Synthetic
gctcctttgttccgcataag

SEQ ID NO: 2563 - DNA, 20 bp, Artificial Sequence
  Synthetic
gctcctttgttccgcataag

SEQ ID NO: 2564 - DNA, 20 bp, Artificial Sequence
  Synthetic
gctcctttgttccgcataag

SEQ ID NO: 2565 - DNA, 20 bp, Artificial Sequence
  Synthetic
gctcctttgttccgcataag

SEQ ID NO: 2566 - DNA, 20 bp, Artificial Sequence
  Synthetic
gctcctttgttccgcataag

SEQ ID NO: 2567 - DNA, 20 bp, Artificial Sequence
  Synthetic
gctcctttgttccgcataag

SEQ ID NO: 2568 - DNA, 20 bp, Artificial Sequence
  Synthetic
gctcctttgttccgcataag

SEQ ID NO: 2569 - DNA, 20 bp, Artificial Sequence
  Synthetic
gctcctttgttccgcataag

SEQ ID NO: 2570 - DNA, 20 bp, Artificial Sequence
  Synthetic
gctcctttgttccgcataag

SEQ ID NO: 2571 - DNA, 20 bp, Artificial Sequence
  Synthetic
gctcctttgttccgcataag

SEQ ID NO: 2572 - DNA, 20 bp, Artificial Sequence
  Synthetic
gctcctttgttccgcataag

SEQ ID NO: 2573 - DNA, 20 bp, Artificial Sequence
  Synthetic
gctcctttgttccgcataag

SEQ ID NO: 2574 - DNA, 20 bp, Artificial Sequence
  Synthetic
gctcctttgttccgcataag

SEQ ID NO: 2575 - DNA, 20 bp, Artificial Sequence
  Synthetic
gctcctttgttccgcataag

SEQ ID NO: 2576 - DNA, 20 bp, Artificial Sequence
  Synthetic
gctcctttgttccgcataag

SEQ ID NO: 2577 - DNA, 20 bp, Artificial Sequence
  Synthetic
gctcctttgttccgcataag

SEQ ID NO: 2578 - DNA, 20 bp, Artificial Sequence
  Synthetic
gctcctttgttccgcataag

SEQ ID NO: 2579 - DNA, 20 bp, Artificial Sequence
  Synthetic
gctcctttgttccgcataag

SEQ ID NO: 2580 - DNA, 20 bp, Artificial Sequence
  Synthetic
gctcctttgttccgcataag

SEQ ID NO: 2581 - DNA, 20 bp, Artificial Sequence
  Synthetic
gctcctttgttccgcataag

SEQ ID NO: 2582 - DNA, 20 bp, Artificial Sequence
  Synthetic
catgttcaccaaccagatgc

SEQ ID NO: 2583 - DNA, 20 bp, Artificial Sequence
  Synthetic
catgttcaccaaccagatgc

SEQ ID NO: 2584 - DNA, 20 bp, Artificial Sequence
  Synthetic
catgttcaccaaccagatgc

SEQ ID NO: 2585 - DNA, 20 bp, Artificial Sequence
  Synthetic
catgttcaccaaccagatgc

SEQ ID NO: 2586 - DNA, 20 bp, Artificial Sequence
  Synthetic
catgttcaccaaccagatgc

SEQ ID NO: 2587 - DNA, 20 bp, Artificial Sequence
  Synthetic
catgttcaccaaccagatgc

SEQ ID NO: 2588 - DNA, 20 bp, Artificial Sequence
  Synthetic
catgttcaccaaccagatgc

SEQ ID NO: 2589 - DNA, 20 bp, Artificial Sequence
  Synthetic
catgttcaccaaccagatgc

SEQ ID NO: 2590 - DNA, 20 bp, Artificial Sequence
  Synthetic
catgttcaccaaccagatgc

SEQ ID NO: 2591 - DNA, 20 bp, Artificial Sequence
  Synthetic
catgttcaccaaccagatgc

SEQ ID NO: 2592 - DNA, 20 bp, Artificial Sequence
  Synthetic
catgttcaccaaccagatgc

SEQ ID NO: 2593 - DNA, 20 bp, Artificial Sequence
  Synthetic
catgttcaccaaccagatgc

SEQ ID NO: 2594 - DNA, 20 bp, Artificial Sequence
  Synthetic
catgttcaccaaccagatgc

SEQ ID NO: 2595 - DNA, 20 bp, Artificial Sequence
  Synthetic
catgttcaccaaccagatgc

SEQ ID NO: 2596 - DNA, 20 bp, Artificial Sequence
  Synthetic
catgttcaccaaccagatgc

SEQ ID NO: 2597 - DNA, 20 bp, Artificial Sequence
  Synthetic
catgttcaccaaccagatgc

SEQ ID NO: 2598 - DNA, 20 bp, Artificial Sequence
  Synthetic
catgttcaccaaccagatgc

SEQ ID NO: 2599 - DNA, 20 bp, Artificial Sequence
  Synthetic
caggagcgctttgaaagaca

SEQ ID NO: 2600 - DNA, 20 bp, Artificial Sequence
  Synthetic
caggagcgctttgaaagaca

SEQ ID NO: 2601 - DNA, 20 bp, Artificial Sequence
  Synthetic
caggagcgctttgaaagaca

SEQ ID NO: 2602 - DNA, 20 bp, Artificial Sequence
  Synthetic
caggagcgctttgaaagaca

SEQ ID NO: 2603 - DNA, 20 bp, Artificial Sequence
  Synthetic
caggagcgctttgaaagaca

SEQ ID NO: 2604 - DNA, 20 bp, Artificial Sequence
  Synthetic
caggagcgctttgaaagaca

SEQ ID NO: 2605 - DNA, 20 bp, Artificial Sequence
  Synthetic
caggagcgctttgaaagaca

SEQ ID NO: 2606 - DNA, 20 bp, Artificial Sequence
  Synthetic
caggagcgctttgaaagaca

SEQ ID NO: 2607 - DNA, 20 bp, Artificial Sequence
  Synthetic
caggagcgctttgaaagaca

SEQ ID NO: 2608 - DNA, 20 bp, Artificial Sequence
  Synthetic
caggagcgctttgaaagaca

SEQ ID NO: 2609 - DNA, 20 bp, Artificial Sequence
  Synthetic
caggagcgctttgaaagaca

SEQ ID NO: 2610 - DNA, 20 bp, Artificial Sequence
  Synthetic
caggagcgctttgaaagaca

SEQ ID NO: 2611 - DNA, 20 bp, Artificial Sequence
  Synthetic
caggagcgctttgaaagaca

SEQ ID NO: 2612 - DNA, 20 bp, Artificial Sequence
  Synthetic
caggagcgctttgaaagaca

SEQ ID NO: 2613 - DNA, 20 bp, Artificial Sequence
  Synthetic
caggagcgctttgaaagaca

SEQ ID NO: 2614 - DNA, 20 bp, Artificial Sequence
  Synthetic
caggagcgctttgaaagaca

SEQ ID NO: 2615 - DNA, 20 bp, Artificial Sequence
  Synthetic
caggagcgctttgaaagaca

SEQ ID NO: 2616 - DNA, 20 bp, Artificial Sequence
  Synthetic
caggagcgctttgaaagaca

SEQ ID NO: 2617 - DNA, 20 bp, Artificial Sequence
  Synthetic
caggagcgctttgaaagaca

SEQ ID NO: 2618 - DNA, 20 bp, Artificial Sequence
  Synthetic
caggagcgctttgaaagaca

SEQ ID NO: 2619 - DNA, 20 bp, Artificial Sequence
  Synthetic
caggagcgctttgaaagaca

SEQ ID NO: 2620 - DNA, 20 bp, Artificial Sequence
  Synthetic
caggagcgctttgaaagaca

SEQ ID NO: 2621 - DNA, 20 bp, Artificial Sequence
  Synthetic
caggagcgctttgaaagaca

SEQ ID NO: 2622 - DNA, 20 bp, Artificial Sequence
  Synthetic
caggagcgctttgaaagaca

SEQ ID NO: 2623 - DNA, 20 bp, Artificial Sequence
  Synthetic
caggagcgctttgaaagaca

SEQ ID NO: 2624 - DNA, 20 bp, Artificial Sequence
  Synthetic
caggagcgctttgaaagaca

SEQ ID NO: 2625 - DNA, 20 bp, Artificial Sequence
  Synthetic
caggagcgctttgaaagaca

SEQ ID NO: 2626 - DNA, 20 bp, Artificial Sequence
  Synthetic
caggagcgctttgaaagaca

SEQ ID NO: 2627 - DNA, 20 bp, Artificial Sequence
  Synthetic
caggagcgctttgaaagaca

SEQ ID NO: 2628 - DNA, 20 bp, Artificial Sequence
  Synthetic
caggagcgctttgaaagaca

SEQ ID NO: 2629 - DNA, 20 bp, Artificial Sequence
  Synthetic
caggagcgctttgaaagaca

SEQ ID NO: 2630 - DNA, 20 bp, Artificial Sequence
  Synthetic
caggagcgctttgaaagaca

SEQ ID NO: 2631 - DNA, 20 bp, Artificial Sequence
  Synthetic
caggagcgctttgaaagaca

SEQ ID NO: 2632 - DNA, 20 bp, Artificial Sequence
  Synthetic
caggagcgctttgaaagaca

SEQ ID NO: 2633 - DNA, 20 bp, Artificial Sequence
  Synthetic
caggagcgctttgaaagaca

SEQ ID NO: 2634 - DNA, 20 bp, Artificial Sequence
  Synthetic
caggagcgctttgaaagaca

SEQ ID NO: 2635 - DNA, 20 bp, Artificial Sequence
  Synthetic
caggagcgctttgaaagaca

SEQ ID NO: 2636 - DNA, 20 bp, Artificial Sequence
  Synthetic
caggagcgctttgaaagaca

SEQ ID NO: 2637 - DNA, 20 bp, Artificial Sequence
  Synthetic
caggagcgctttgaaagaca

SEQ ID NO: 2638 - DNA, 20 bp, Artificial Sequence
  Synthetic
caggagcgctttgaaagaca

SEQ ID NO: 2639 - DNA, 20 bp, Artificial Sequence
  Synthetic
caggagcgctttgaaagaca

SEQ ID NO: 2640 - DNA, 20 bp, Artificial Sequence
  Synthetic
caggagcgctttgaaagaca

SEQ ID NO: 2641 - DNA, 20 bp, Artificial Sequence
  Synthetic
caggagcgctttgaaagaca

SEQ ID NO: 2642 - DNA, 20 bp, Artificial Sequence
  Synthetic
caggagcgctttgaaagaca

SEQ ID NO: 2643 - DNA, 20 bp, Artificial Sequence
  Synthetic
caggagcgctttgaaagaca

SEQ ID NO: 2644 - DNA, 20 bp, Artificial Sequence
  Synthetic
caggagcgctttgaaagaca

SEQ ID NO: 2645 - DNA, 20 bp, Artificial Sequence
  Synthetic
caggagcgctttgaaagaca

SEQ ID NO: 2646 - DNA, 20 bp, Artificial Sequence
  Synthetic
caggagcgctttgaaagaca

SEQ ID NO: 2647 - DNA, 20 bp, Artificial Sequence
  Synthetic
caggagcgctttgaaagaca

SEQ ID NO: 2648 - DNA, 20 bp, Artificial Sequence
  Synthetic
caggagcgctttgaaagaca

SEQ ID NO: 2649 - DNA, 20 bp, Artificial Sequence
  Synthetic
caggagcgctttgaaagaca

SEQ ID NO: 2650 - DNA, 20 bp, Artificial Sequence
  Synthetic
caggagcgctttgaaagaca

SEQ ID NO: 2651 - DNA, 20 bp, Artificial Sequence
  Synthetic
caggagcgctttgaaagaca

SEQ ID NO: 2652 - DNA, 20 bp, Artificial Sequence
  Synthetic
caggagcgctttgaaagaca

SEQ ID NO: 2653 - DNA, 20 bp, Artificial Sequence
  Synthetic
caggagcgctttgaaagaca

SEQ ID NO: 2654 - DNA, 20 bp, Artificial Sequence
  Synthetic
caggagcgctttgaaagaca

SEQ ID NO: 2655 - DNA, 20 bp, Artificial Sequence
  Synthetic
caggagcgctttgaaagaca

SEQ ID NO: 2656 - DNA, 20 bp, Artificial Sequence
  Synthetic
caggagcgctttgaaagaca

SEQ ID NO: 2657 - DNA, 20 bp, Artificial Sequence
  Synthetic
caggagcgctttgaaagaca

SEQ ID NO: 2658 - DNA, 20 bp, Artificial Sequence
  Synthetic
caggagcgctttgaaagaca

SEQ ID NO: 2659 - DNA, 20 bp, Artificial Sequence
  Synthetic
caggagcgctttgaaagaca

SEQ ID NO: 2660 - DNA, 20 bp, Artificial Sequence
  Synthetic
caggagcgctttgaaagaca

SEQ ID NO: 2661 - DNA, 20 bp, Artificial Sequence
  Synthetic
caggagcgctttgaaagaca

SEQ ID NO: 2662 - DNA, 20 bp, Artificial Sequence
  Synthetic
caggagcgctttgaaagaca

SEQ ID NO: 2663 - DNA, 20 bp, Artificial Sequence
  Synthetic
caggagcgctttgaaagaca

SEQ ID NO: 2664 - DNA, 20 bp, Artificial Sequence
  Synthetic
caggagcgctttgaaagaca

SEQ ID NO: 2665 - DNA, 20 bp, Artificial Sequence
  Synthetic
caggagcgctttgaaagaca

SEQ ID NO: 2666 - DNA, 20 bp, Artificial Sequence
  Synthetic
caggagcgctttgaaagaca

SEQ ID NO: 2667 - DNA, 20 bp, Artificial Sequence
  Synthetic
caggagcgctttgaaagaca

SEQ ID NO: 2668 - DNA, 20 bp, Artificial Sequence
  Synthetic
caggagcgctttgaaagaca

SEQ ID NO: 2669 - DNA, 20 bp, Artificial Sequence
  Synthetic
caggagcgctttgaaagaca

SEQ ID NO: 2670 - DNA, 20 bp, Artificial Sequence
  Synthetic
caggagcgctttgaaagaca

SEQ ID NO: 2671 - DNA, 20 bp, Artificial Sequence
  Synthetic
caggagcgctttgaaagaca

SEQ ID NO: 2672 - DNA, 20 bp, Artificial Sequence
  Synthetic
caggagcgctttgaaagaca

SEQ ID NO: 2673 - DNA, 20 bp, Artificial Sequence
  Synthetic
caggagcgctttgaaagaca

SEQ ID NO: 2674 - DNA, 20 bp, Artificial Sequence
  Synthetic
caggagcgctttgaaagaca

SEQ ID NO: 2675 - DNA, 20 bp, Artificial Sequence
  Synthetic
caggagcgctttgaaagaca

SEQ ID NO: 2676 - DNA, 20 bp, Artificial Sequence
  Synthetic
caggagcgctttgaaagaca

SEQ ID NO: 2677 - DNA, 20 bp, Artificial Sequence
  Synthetic
caggagcgctttgaaagaca

SEQ ID NO: 2678 - DNA, 20 bp, Artificial Sequence
  Synthetic
caggagcgctttgaaagaca

SEQ ID NO: 2679 - DNA, 20 bp, Artificial Sequence
  Synthetic
caggagcgctttgaaagaca

SEQ ID NO: 2680 - DNA, 20 bp, Artificial Sequence
  Synthetic
caggagcgctttgaaagaca

SEQ ID NO: 2681 - DNA, 20 bp, Artificial Sequence
  Synthetic
caggagcgctttgaaagaca

SEQ ID NO: 2682 - DNA, 20 bp, Artificial Sequence
  Synthetic
caggagcgctttgaaagaca

SEQ ID NO: 2683 - DNA, 20 bp, Artificial Sequence
  Synthetic
caggagcgctttgaaagaca

SEQ ID NO: 2684 - DNA, 20 bp, Artificial Sequence
  Synthetic
caggagcgctttgaaagaca

SEQ ID NO: 2685 - DNA, 20 bp, Artificial Sequence
  Synthetic
cccagtcagccacaaaatca

SEQ ID NO: 2686 - DNA, 20 bp, Artificial Sequence
  Synthetic
cccagtcagccacaaaatca

SEQ ID NO: 2687 - DNA, 20 bp, Artificial Sequence
  Synthetic
cccagtcagccacaaaatca

SEQ ID NO: 2688 - DNA, 20 bp, Artificial Sequence
  Synthetic
cccagtcagccacaaaatca

SEQ ID NO: 2689 - DNA, 20 bp, Artificial Sequence
  Synthetic
cccagtcagccacaaaatca

SEQ ID NO: 2690 - DNA, 20 bp, Artificial Sequence
  Synthetic
cccagtcagccacaaaatca

SEQ ID NO: 2691 - DNA, 20 bp, Artificial Sequence
  Synthetic
cccagtcagccacaaaatca

SEQ ID NO: 2692 - DNA, 20 bp, Artificial Sequence
  Synthetic
cccagtcagccacaaaatca

SEQ ID NO: 2693 - DNA, 20 bp, Artificial Sequence
  Synthetic
cccagtcagccacaaaatca

SEQ ID NO: 2694 - DNA, 20 bp, Artificial Sequence
  Synthetic
ggaggaggctgatttgtgct

SEQ ID NO: 2695 - DNA, 20 bp, Artificial Sequence
  Synthetic
ggaggaggctgatttgtgct

SEQ ID NO: 2696 - DNA, 20 bp, Artificial Sequence
  Synthetic
ggaggaggctgatttgtgct

SEQ ID NO: 2697 - DNA, 20 bp, Artificial Sequence
  Synthetic
ggaggaggctgatttgtgct

SEQ ID NO: 2698 - DNA, 20 bp, Artificial Sequence
  Synthetic
ggtgctggcagtgacaaatg

SEQ ID NO: 2699 - DNA, 20 bp, Artificial Sequence
  Synthetic
ggtgctggcagtgacaaatg

SEQ ID NO: 2700 - DNA, 20 bp, Artificial Sequence
  Synthetic
ggaggaggctgatttgtgct

SEQ ID NO: 2701 - DNA, 20 bp, Artificial Sequence
  Synthetic
aaagaagctgtggcagtgga

SEQ ID NO: 2702 - DNA, 20 bp, Artificial Sequence
  Synthetic
acagaagggggacagagagt

SEQ ID NO: 2703 - DNA, 20 bp, Artificial Sequence
  Synthetic
ttctgggcacttcacagtca

SEQ ID NO: 2704 - DNA, 20 bp, Artificial Sequence
  Synthetic
ttctgggcacttcacagtca

SEQ ID NO: 2705 - DNA, 20 bp, Artificial Sequence
  Synthetic
ctgtgagcactgaggaaggg

SEQ ID NO: 2706 - DNA, 20 bp, Artificial Sequence
  Synthetic
ctgtgagcactgaggaaggg

SEQ ID NO: 2707 - DNA, 20 bp, Artificial Sequence
  Synthetic
ctgtgagcactgaggaaggg

SEQ ID NO: 2708 - DNA, 20 bp, Artificial Sequence
  Synthetic
ctgtgagcactgaggaaggg

SEQ ID NO: 2709 - DNA, 20 bp, Artificial Sequence
  Synthetic
ctgtgagcactgaggaaggg

SEQ ID NO: 2710 - DNA, 20 bp, Artificial Sequence
  Synthetic
ctgtgagcactgaggaaggg

SEQ ID NO: 2711 - DNA, 20 bp, Artificial Sequence
  Synthetic
ctgtgagcactgaggaaggg

SEQ ID NO: 2712 - DNA, 20 bp, Artificial Sequence
  Synthetic
ctgtgagcactgaggaaggg

SEQ ID NO: 2713 - DNA, 20 bp, Artificial Sequence
  Synthetic
acacagcctgacagagttgg

SEQ ID NO: 2714 - DNA, 20 bp, Artificial Sequence
  Synthetic
acacagcctgacagagttgg

SEQ ID NO: 2715 - DNA, 20 bp, Artificial Sequence
  Synthetic
acacagcctgacagagttgg

SEQ ID NO: 2716 - DNA, 20 bp, Artificial Sequence
  Synthetic
acacagcctgacagagttgg

SEQ ID NO: 2717 - DNA, 20 bp, Artificial Sequence
  Synthetic
acacagcctgacagagttgg

SEQ ID NO: 2718 - DNA, 20 bp, Artificial Sequence
  Synthetic
acacagcctgacagagttgg

SEQ ID NO: 2719 - DNA, 20 bp, Artificial Sequence
  Synthetic
acacagcctgacagagttgg

SEQ ID NO: 2720 - DNA, 20 bp, Artificial Sequence
  Synthetic
acacagcctgacagagttgg

SEQ ID NO: 2721 - DNA, 20 bp, Artificial Sequence
  Synthetic
acacagcctgacagagttgg

SEQ ID NO: 2722 - DNA, 20 bp, Artificial Sequence
  Synthetic
acacagcctgacagagttgg

SEQ ID NO: 2723 - DNA, 20 bp, Artificial Sequence
  Synthetic
acacagcctgacagagttgg

SEQ ID NO: 2724 - DNA, 20 bp, Artificial Sequence
  Synthetic
ttgcttttgaccacgtgcag

SEQ ID NO: 2725 - DNA, 20 bp, Artificial Sequence
  Synthetic
acacagcctgacagagttgg

SEQ ID NO: 2726 - DNA, 20 bp, Artificial Sequence
  Synthetic
acacagcctgacagagttgg

SEQ ID NO: 2727 - DNA, 20 bp, Artificial Sequence
  Synthetic
ttgcttttgaccacgtgcag

SEQ ID NO: 2728 - DNA, 20 bp, Artificial Sequence
  Synthetic
ttgcttttgaccacgtgcag

SEQ ID NO: 2729 - DNA, 20 bp, Artificial Sequence
  Synthetic
ttgcttttgaccacgtgcag

SEQ ID NO: 2730 - DNA, 20 bp, Artificial Sequence
  Synthetic
ttgcttttgaccacgtgcag

SEQ ID NO: 2731 - DNA, 20 bp, Artificial Sequence
  Synthetic
cacagctttttgcctcgctt

SEQ ID NO: 2732 - DNA, 20 bp, Artificial Sequence
  Synthetic
cacagctttttgcctcgctt

SEQ ID NO: 2733 - DNA, 20 bp, Artificial Sequence
  Synthetic
cacagctttttgcctcgctt

SEQ ID NO: 2734 - DNA, 20 bp, Artificial Sequence
  Synthetic
cacagctttttgcctcgctt

SEQ ID NO: 2735 - DNA, 20 bp, Artificial Sequence
  Synthetic
cacagctttttgcctcgctt

SEQ ID NO: 2736 - DNA, 20 bp, Artificial Sequence
  Synthetic
cacagctttttgcctcgctt

SEQ ID NO: 2737 - DNA, 20 bp, Artificial Sequence
  Synthetic
ttaacctgaccctgcagctg

SEQ ID NO: 2738 - DNA, 20 bp, Artificial Sequence
  Synthetic
ttaacctgaccctgcagctg

SEQ ID NO: 2739 - DNA, 20 bp, Artificial Sequence
  Synthetic
cacagctttttgcctcgctt

SEQ ID NO: 2740 - DNA, 20 bp, Artificial Sequence
  Synthetic
cacagctttttgcctcgctt

SEQ ID NO: 2741 - DNA, 20 bp, Artificial Sequence
  Synthetic
cacagctttttgcctcgctt

SEQ ID NO: 2742 - DNA, 20 bp, Artificial Sequence
  Synthetic
caaaacatagccgggcacag

SEQ ID NO: 2743 - DNA, 20 bp, Artificial Sequence
  Synthetic
caaaacatagccgggcacag

SEQ ID NO: 2744 - DNA, 20 bp, Artificial Sequence
  Synthetic
caaaacatagccgggcacag

SEQ ID NO: 2745 - DNA, 20 bp, Artificial Sequence
  Synthetic
caaaacatagccgggcacag

SEQ ID NO: 2746 - DNA, 20 bp, Artificial Sequence
  Synthetic
tgggggagcatagaccttgt

SEQ ID NO: 2747 - DNA, 20 bp, Artificial Sequence
  Synthetic
tgggggagcatagaccttgt

SEQ ID NO: 2748 - DNA, 20 bp, Artificial Sequence
  Synthetic
tgggggagcatagaccttgt

SEQ ID NO: 2749 - DNA, 20 bp, Artificial Sequence
  Synthetic
tgggggagcatagaccttgt

SEQ ID NO: 2750 - DNA, 20 bp, Artificial Sequence
  Synthetic
tgggggagcatagaccttgt

SEQ ID NO: 2751 - DNA, 20 bp, Artificial Sequence
  Synthetic
ttgggcggatcaattgagct

SEQ ID NO: 2752 - DNA, 20 bp, Artificial Sequence
  Synthetic
ttgggcggatcaattgagct

SEQ ID NO: 2753 - DNA, 20 bp, Artificial Sequence
  Synthetic
ttgggcggatcaattgagct

SEQ ID NO: 2754 - DNA, 20 bp, Artificial Sequence
  Synthetic
ttgggcggatcaattgagct

SEQ ID NO: 2755 - DNA, 20 bp, Artificial Sequence
  Synthetic
cctgaagttgcccactctgt

SEQ ID NO: 2756 - DNA, 20 bp, Artificial Sequence
  Synthetic
cctgaagttgcccactctgt

SEQ ID NO: 2757 - DNA, 20 bp, Artificial Sequence
  Synthetic
cctgaagttgcccactctgt

SEQ ID NO: 2758 - DNA, 20 bp, Artificial Sequence
  Synthetic
cctgaagttgcccactctgt

SEQ ID NO: 2759 - DNA, 20 bp, Artificial Sequence
  Synthetic
cctgaagttgcccactctgt

SEQ ID NO: 2760 - DNA, 20 bp, Artificial Sequence
  Synthetic
cctgaagttgcccactctgt

SEQ ID NO: 2761 - DNA, 20 bp, Artificial Sequence
  Synthetic
cctgaagttgcccactctgt

SEQ ID NO: 2762 - DNA, 20 bp, Artificial Sequence
  Synthetic
cctgaagttgcccactctgt

SEQ ID NO: 2763 - DNA, 20 bp, Artificial Sequence
  Synthetic
tgagtctgagtacccgaggg

SEQ ID NO: 2764 - DNA, 20 bp, Artificial Sequence
  Synthetic
cctgaagttgcccactctgt

SEQ ID NO: 2765 - DNA, 20 bp, Artificial Sequence
  Synthetic
tgagtctgagtacccgaggg

SEQ ID NO: 2766 - DNA, 20 bp, Artificial Sequence
  Synthetic
tgagtctgagtacccgaggg

SEQ ID NO: 2767 - DNA, 20 bp, Artificial Sequence
  Synthetic
tgagtctgagtacccgaggg

SEQ ID NO: 2768 - DNA, 20 bp, Artificial Sequence
  Synthetic
cagcaactgcagcaactcag

SEQ ID NO: 2769 - DNA, 20 bp, Artificial Sequence
  Synthetic
gcaacccattagcccagact

SEQ ID NO: 2770 - DNA, 20 bp, Artificial Sequence
  Synthetic
gcaacccattagcccagact

SEQ ID NO: 2771 - DNA, 20 bp, Artificial Sequence
  Synthetic
gcaacccattagcccagact

SEQ ID NO: 2772 - DNA, 20 bp, Artificial Sequence
  Synthetic
gcaacccattagcccagact

SEQ ID NO: 2773 - DNA, 20 bp, Artificial Sequence
  Synthetic
gcaacccattagcccagact

SEQ ID NO: 2774 - DNA, 20 bp, Artificial Sequence
  Synthetic
gcaacccattagcccagact

SEQ ID NO: 2775 - DNA, 20 bp, Artificial Sequence
  Synthetic
gcaacccattagcccagact

SEQ ID NO: 2776 - DNA, 20 bp, Artificial Sequence
  Synthetic
ggaagctatacccaccaccg

SEQ ID NO: 2777 - DNA, 20 bp, Artificial Sequence
  Synthetic
agccagaccagacacacaac

SEQ ID NO: 2778 - DNA, 20 bp, Artificial Sequence
  Synthetic
agccagaccagacacacaac

SEQ ID NO: 2779 - DNA, 20 bp, Artificial Sequence
  Synthetic
agccagaccagacacacaac

SEQ ID NO: 2780 - DNA, 20 bp, Artificial Sequence
  Synthetic
agccagaccagacacacaac

SEQ ID NO: 2781 - DNA, 20 bp, Artificial Sequence
  Synthetic
agccagaccagacacacaac

SEQ ID NO: 2782 - DNA, 20 bp, Artificial Sequence
  Synthetic
agccagaccagacacacaac

SEQ ID NO: 2783 - DNA, 20 bp, Artificial Sequence
  Synthetic
agccagaccagacacacaac

SEQ ID NO: 2784 - DNA, 20 bp, Artificial Sequence
  Synthetic
agccagaccagacacacaac

SEQ ID NO: 2785 - DNA, 20 bp, Artificial Sequence
  Synthetic
cagcccagacatccacatgt

SEQ ID NO: 2786 - DNA, 20 bp, Artificial Sequence
  Synthetic
cagcccagacatccacatgt

SEQ ID NO: 2787 - DNA, 20 bp, Artificial Sequence
  Synthetic
cagcccagacatccacatgt

SEQ ID NO: 2788 - DNA, 20 bp, Artificial Sequence
  Synthetic
cagcccagacatccacatgt

SEQ ID NO: 2789 - DNA, 20 bp, Artificial Sequence
  Synthetic
cagcccagacatccacatgt

SEQ ID NO: 2790 - DNA, 20 bp, Artificial Sequence
  Synthetic
cagcccagacatccacatgt

SEQ ID NO: 2791 - DNA, 20 bp, Artificial Sequence
  Synthetic
cagcccagacatccacatgt

SEQ ID NO: 2792 - DNA, 20 bp, Artificial Sequence
  Synthetic
cagcccagacatccacatgt

SEQ ID NO: 2793 - DNA, 20 bp, Artificial Sequence
  Synthetic
cagcccagacatccacatgt

SEQ ID NO: 2794 - DNA, 20 bp, Artificial Sequence
  Synthetic
cagcccagacatccacatgt

SEQ ID NO: 2795 - DNA, 20 bp, Artificial Sequence
  Synthetic
cagcccagacatccacatgt

SEQ ID NO: 2796 - DNA, 20 bp, Artificial Sequence
  Synthetic
cagcccagacatccacatgt

SEQ ID NO: 2797 - DNA, 20 bp, Artificial Sequence
  Synthetic
cagcccagacatccacatgt

SEQ ID NO: 2798 - DNA, 20 bp, Artificial Sequence
  Synthetic
cagcccagacatccacatgt

SEQ ID NO: 2799 - DNA, 20 bp, Artificial Sequence
  Synthetic
cagcccagacatccacatgt

SEQ ID NO: 2800 - DNA, 20 bp, Artificial Sequence
  Synthetic
cagcccagacatccacatgt

SEQ ID NO: 2801 - DNA, 20 bp, Artificial Sequence
  Synthetic
cagcccagacatccacatgt

SEQ ID NO: 2802 - DNA, 20 bp, Artificial Sequence
  Synthetic
cagcccagacatccacatgt

SEQ ID NO: 2803 - DNA, 20 bp, Artificial Sequence
  Synthetic
cagcccagacatccacatgt

SEQ ID NO: 2804 - DNA, 20 bp, Artificial Sequence
  Synthetic
cagcccagacatccacatgt

SEQ ID NO: 2805 - DNA, 20 bp, Artificial Sequence
  Synthetic
caaggtgctgagagccaaga

SEQ ID NO: 2806 - DNA, 20 bp, Artificial Sequence
  Synthetic
caaggtgctgagagccaaga

SEQ ID NO: 2807 - DNA, 20 bp, Artificial Sequence
  Synthetic
caaggtgctgagagccaaga

SEQ ID NO: 2808 - DNA, 20 bp, Artificial Sequence
  Synthetic
caaggtgctgagagccaaga

SEQ ID NO: 2809 - DNA, 20 bp, Artificial Sequence
  Synthetic
caaggtgctgagagccaaga

SEQ ID NO: 2810 - DNA, 20 bp, Artificial Sequence
  Synthetic
caaggtgctgagagccaaga

SEQ ID NO: 2811 - DNA, 20 bp, Artificial Sequence
  Synthetic
caaggtgctgagagccaaga

SEQ ID NO: 2812 - DNA, 20 bp, Artificial Sequence
  Synthetic
caaggtgctgagagccaaga

SEQ ID NO: 2813 - DNA, 20 bp, Artificial Sequence
  Synthetic
caaggtgctgagagccaaga

SEQ ID NO: 2814 - DNA, 20 bp, Artificial Sequence
  Synthetic
caaggtgctgagagccaaga

SEQ ID NO: 2815 - DNA, 20 bp, Artificial Sequence
  Synthetic
caaggtgctgagagccaaga

SEQ ID NO: 2816 - DNA, 20 bp, Artificial Sequence
  Synthetic
caaggtgctgagagccaaga

SEQ ID NO: 2817 - DNA, 20 bp, Artificial Sequence
  Synthetic
caaggtgctgagagccaaga

SEQ ID NO: 2818 - DNA, 20 bp, Artificial Sequence
  Synthetic
caaggtgctgagagccaaga

SEQ ID NO: 2819 - DNA, 20 bp, Artificial Sequence
  Synthetic
ggtctcgaggttgtcactgg

SEQ ID NO: 2820 - DNA, 20 bp, Artificial Sequence
  Synthetic
ggtctcgaggttgtcactgg

SEQ ID NO: 2821 - DNA, 20 bp, Artificial Sequence
  Synthetic
ggtctcgaggttgtcactgg

SEQ ID NO: 2822 - DNA, 20 bp, Artificial Sequence
  Synthetic
cccgggacataaaggtggac

SEQ ID NO: 2823 - DNA, 20 bp, Artificial Sequence
  Synthetic
ggtctcgaggttgtcactgg

SEQ ID NO: 2824 - DNA, 20 bp, Artificial Sequence
  Synthetic
ggtctcgaggttgtcactgg

SEQ ID NO: 2825 - DNA, 20 bp, Artificial Sequence
  Synthetic
cccgggacataaaggtggac

SEQ ID NO: 2826 - DNA, 20 bp, Artificial Sequence
  Synthetic
cccgggacataaaggtggac

SEQ ID NO: 2827 - DNA, 20 bp, Artificial Sequence
  Synthetic
cccgggacataaaggtggac

SEQ ID NO: 2828 - DNA, 20 bp, Artificial Sequence
  Synthetic
agtgtgagtcaggggtcaga

SEQ ID NO: 2829 - DNA, 20 bp, Artificial Sequence
  Synthetic
agtgtgagtcaggggtcaga

SEQ ID NO: 2830 - DNA, 20 bp, Artificial Sequence
  Synthetic
agtgtgagtcaggggtcaga

SEQ ID NO: 2831 - DNA, 20 bp, Artificial Sequence
  Synthetic
agtgtgagtcaggggtcaga

SEQ ID NO: 2832 - DNA, 20 bp, Artificial Sequence
  Synthetic
agtgtgagtcaggggtcaga

SEQ ID NO: 2833 - DNA, 20 bp, Artificial Sequence
  Synthetic
agtgtgagtcaggggtcaga

SEQ ID NO: 2834 - DNA, 20 bp, Artificial Sequence
  Synthetic
agtgtgagtcaggggtcaga

SEQ ID NO: 2835 - DNA, 20 bp, Artificial Sequence
  Synthetic
agtgtgagtcaggggtcaga

SEQ ID NO: 2836 - DNA, 20 bp, Artificial Sequence
  Synthetic
agtgtgagtcaggggtcaga

SEQ ID NO: 2837 - DNA, 20 bp, Artificial Sequence
  Synthetic
tcaccagttctgtgggcatc

SEQ ID NO: 2838 - DNA, 20 bp, Artificial Sequence
  Synthetic
tcaccagttctgtgggcatc

SEQ ID NO: 2839 - DNA, 20 bp, Artificial Sequence
  Synthetic
agtgtgagtcaggggtcaga

SEQ ID NO: 2840 - DNA, 20 bp, Artificial Sequence
  Synthetic
tcaccagttctgtgggcatc

SEQ ID NO: 2841 - DNA, 20 bp, Artificial Sequence
  Synthetic
tcaccagttctgtgggcatc

SEQ ID NO: 2842 - DNA, 20 bp, Artificial Sequence
  Synthetic
tcaccagttctgtgggcatc

SEQ ID NO: 2843 - DNA, 20 bp, Artificial Sequence
  Synthetic
tcaccagttctgtgggcatc

SEQ ID NO: 2844 - DNA, 20 bp, Artificial Sequence
  Synthetic
tcaccagttctgtgggcatc

SEQ ID NO: 2845 - DNA, 20 bp, Artificial Sequence
  Synthetic
tcaccagttctgtgggcatc

SEQ ID NO: 2846 - DNA, 20 bp, Artificial Sequence
  Synthetic
tcaccagttctgtgggcatc

SEQ ID NO: 2847 - DNA, 20 bp, Artificial Sequence
  Synthetic
tcaccagttctgtgggcatc

SEQ ID NO: 2848 - DNA, 20 bp, Artificial Sequence
  Synthetic
agcagctggtccatttaccc

SEQ ID NO: 2849 - DNA, 20 bp, Artificial Sequence
  Synthetic
agcagctggtccatttaccc

SEQ ID NO: 2850 - DNA, 20 bp, Artificial Sequence
  Synthetic
agcagctggtccatttaccc

SEQ ID NO: 2851 - DNA, 20 bp, Artificial Sequence
  Synthetic
agcagctggtccatttaccc

SEQ ID NO: 2852 - DNA, 20 bp, Artificial Sequence
  Synthetic
agcagctggtccatttaccc

SEQ ID NO: 2853 - DNA, 20 bp, Artificial Sequence
  Synthetic
agcagctggtccatttaccc

SEQ ID NO: 2854 - DNA, 20 bp, Artificial Sequence
  Synthetic
agcagctggtccatttaccc

SEQ ID NO: 2855 - DNA, 20 bp, Artificial Sequence
  Synthetic
agcagctggtccatttaccc

SEQ ID NO: 2856 - DNA, 20 bp, Artificial Sequence
  Synthetic
agcagctggtccatttaccc

SEQ ID NO: 2857 - DNA, 20 bp, Artificial Sequence
  Synthetic
ggccatgagtagcttgagca

SEQ ID NO: 2858 - DNA, 20 bp, Artificial Sequence
  Synthetic
ggccatgagtagcttgagca

SEQ ID NO: 2859 - DNA, 20 bp, Artificial Sequence
  Synthetic
ggccatgagtagcttgagca

SEQ ID NO: 2860 - DNA, 20 bp, Artificial Sequence
  Synthetic
ggccatgagtagcttgagca

SEQ ID NO: 2861 - DNA, 20 bp, Artificial Sequence
  Synthetic
gaggtgagcagagcttcctg

SEQ ID NO: 2862 - DNA, 20 bp, Artificial Sequence
  Synthetic
gaggtgagcagagcttcctg

SEQ ID NO: 2863 - DNA, 20 bp, Artificial Sequence
  Synthetic
ttagttgggcttggtgggac

SEQ ID NO: 2864 - DNA, 20 bp, Artificial Sequence
  Synthetic
ttagttgggcttggtgggac

SEQ ID NO: 2865 - DNA, 20 bp, Artificial Sequence
  Synthetic
ttagttgggcttggtgggac

SEQ ID NO: 2866 - DNA, 20 bp, Artificial Sequence
  Synthetic
ttagttgggcttggtgggac

SEQ ID NO: 2867 - DNA, 20 bp, Artificial Sequence
  Synthetic
ttagttgggcttggtgggac

SEQ ID NO: 2868 - DNA, 20 bp, Artificial Sequence
  Synthetic
ttagttgggcttggtgggac

SEQ ID NO: 2869 - DNA, 20 bp, Artificial Sequence
  Synthetic
ttagttgggcttggtgggac

SEQ ID NO: 2870 - DNA, 20 bp, Artificial Sequence
  Synthetic
ttagttgggcttggtgggac

SEQ ID NO: 2871 - DNA, 20 bp, Artificial Sequence
  Synthetic
attgttccgtgggtggagtc

SEQ ID NO: 2872 - DNA, 20 bp, Artificial Sequence
  Synthetic
attgttccgtgggtggagtc

SEQ ID NO: 2873 - DNA, 20 bp, Artificial Sequence
  Synthetic
attgttccgtgggtggagtc

SEQ ID NO: 2874 - DNA, 20 bp, Artificial Sequence
  Synthetic
attgttccgtgggtggagtc

SEQ ID NO: 2875 - DNA, 20 bp, Artificial Sequence
  Synthetic
tgtttgctgtgtaccaggca

SEQ ID NO: 2876 - DNA, 20 bp, Artificial Sequence
  Synthetic
tgtttgctgtgtaccaggca

SEQ ID NO: 2877 - DNA, 20 bp, Artificial Sequence
  Synthetic
tgtttgctgtgtaccaggca

SEQ ID NO: 2878 - DNA, 20 bp, Artificial Sequence
  Synthetic
tgtttgctgtgtaccaggca

SEQ ID NO: 2879 - DNA, 20 bp, Artificial Sequence
  Synthetic
caggtgattttgcccaaccg

SEQ ID NO: 2880 - DNA, 20 bp, Artificial Sequence
  Synthetic
caggatcttggctcactgca

SEQ ID NO: 2881 - DNA, 20 bp, Artificial Sequence
  Synthetic
caggatcttggctcactgca

SEQ ID NO: 2882 - DNA, 20 bp, Artificial Sequence
  Synthetic
caggatcttggctcactgca

SEQ ID NO: 2883 - DNA, 20 bp, Artificial Sequence
  Synthetic
caggatcttggctcactgca

SEQ ID NO: 2884 - DNA, 20 bp, Artificial Sequence
  Synthetic
aagcgaggcaaaaagctgtg

SEQ ID NO: 2885 - DNA, 20 bp, Artificial Sequence
  Synthetic
aagcgaggcaaaaagctgtg

SEQ ID NO: 2886 - DNA, 20 bp, Artificial Sequence
  Synthetic
cctggccaccctttgttctt

SEQ ID NO: 2887 - DNA, 20 bp, Artificial Sequence
  Synthetic
ggcttagaggatggtgctcc

SEQ ID NO: 2888 - DNA, 20 bp, Artificial Sequence
  Synthetic
aagcgaggcaaaaagctgtg

SEQ ID NO: 2889 - DNA, 20 bp, Artificial Sequence
  Synthetic
cagctgcagggtcaggttaa

SEQ ID NO: 2890 - DNA, 20 bp, Artificial Sequence
  Synthetic
cagctgcagggtcaggttaa

SEQ ID NO: 2891 - DNA, 20 bp, Artificial Sequence
  Synthetic
ccacagctagaagttggggg

SEQ ID NO: 2892 - DNA, 20 bp, Artificial Sequence
  Synthetic
ccacagctagaagttggggg

SEQ ID NO: 2893 - DNA, 20 bp, Artificial Sequence
  Synthetic
ccacagctagaagttggggg

SEQ ID NO: 2894 - DNA, 20 bp, Artificial Sequence
  Synthetic
ccacagctagaagttggggg

SEQ ID NO: 2895 - DNA, 20 bp, Artificial Sequence
  Synthetic
ccacagctagaagttggggg

SEQ ID NO: 2896 - DNA, 20 bp, Artificial Sequence
  Synthetic
ccacagctagaagttggggg

SEQ ID NO: 2897 - DNA, 20 bp, Artificial Sequence
  Synthetic
ccacagctagaagttggggg

SEQ ID NO: 2898 - DNA, 20 bp, Artificial Sequence
  Synthetic
ccacagctagaagttggggg

SEQ ID NO: 2899 - DNA, 20 bp, Artificial Sequence
  Synthetic
gcacaaatcagcctcctcct

SEQ ID NO: 2900 - DNA, 20 bp, Artificial Sequence
  Synthetic
gcacaaatcagcctcctcct

SEQ ID NO: 2901 - DNA, 20 bp, Artificial Sequence
  Synthetic
gcacaaatcagcctcctcct

SEQ ID NO: 2902 - DNA, 20 bp, Artificial Sequence
  Synthetic
gcacaaatcagcctcctcct

SEQ ID NO: 2903 - DNA, 20 bp, Artificial Sequence
  Synthetic
gcacaaatcagcctcctcct

SEQ ID NO: 2904 - DNA, 20 bp, Artificial Sequence
  Synthetic
gcacaaatcagcctcctcct

SEQ ID NO: 2905 - DNA, 20 bp, Artificial Sequence
  Synthetic
gcacaaatcagcctcctcct

SEQ ID NO: 2906 - DNA, 20 bp, Artificial Sequence
  Synthetic
acctctctgaccaccagtgt

SEQ ID NO: 2907 - DNA, 20 bp, Artificial Sequence
  Synthetic
gcacaaatcagcctcctcct

SEQ ID NO: 2908 - DNA, 20 bp, Artificial Sequence
  Synthetic
acctctctgaccaccagtgt

SEQ ID NO: 2909 - DNA, 20 bp, Artificial Sequence
  Synthetic
acctctctgaccaccagtgt

SEQ ID NO: 2910 - DNA, 20 bp, Artificial Sequence
  Synthetic
actgcctgttttcatggcct

SEQ ID NO: 2911 - DNA, 20 bp, Artificial Sequence
  Synthetic
acctctctgaccaccagtgt

SEQ ID NO: 2912 - DNA, 20 bp, Artificial Sequence
  Synthetic
acctctctgaccaccagtgt

SEQ ID NO: 2913 - DNA, 20 bp, Artificial Sequence
  Synthetic
actgcctgttttcatggcct

SEQ ID NO: 2914 - DNA, 20 bp, Artificial Sequence
  Synthetic
actgcctgttttcatggcct

SEQ ID NO: 2915 - DNA, 20 bp, Artificial Sequence
  Synthetic
tccactgccacagcttcttt

SEQ ID NO: 2916 - DNA, 20 bp, Artificial Sequence
  Synthetic
tccactgccacagcttcttt

SEQ ID NO: 2917 - DNA, 20 bp, Artificial Sequence
  Synthetic
gcagaggaagacgccatctc

SEQ ID NO: 2918 - DNA, 20 bp, Artificial Sequence
  Synthetic
gcagaggaagacgccatctc

SEQ ID NO: 2919 - DNA, 20 bp, Artificial Sequence
  Synthetic
gcagaggaagacgccatctc

SEQ ID NO: 2920 - DNA, 20 bp, Artificial Sequence
  Synthetic
gcagaggaagacgccatctc

SEQ ID NO: 2921 - DNA, 20 bp, Artificial Sequence
  Synthetic
gcagaggaagacgccatctc

SEQ ID NO: 2922 - DNA, 20 bp, Artificial Sequence
  Synthetic
gcagaggaagacgccatctc

SEQ ID NO: 2923 - DNA, 20 bp, Artificial Sequence
  Synthetic
gcagaggaagacgccatctc

SEQ ID NO: 2924 - DNA, 20 bp, Artificial Sequence
  Synthetic
gcagaggaagacgccatctc

SEQ ID NO: 2925 - DNA, 20 bp, Artificial Sequence
  Synthetic
gcagaggaagacgccatctc

SEQ ID NO: 2926 - DNA, 20 bp, Artificial Sequence
  Synthetic
gcagaggaagacgccatctc

SEQ ID NO: 2927 - DNA, 20 bp, Artificial Sequence
  Synthetic
gcagaggaagacgccatctc

SEQ ID NO: 2928 - DNA, 20 bp, Artificial Sequence
  Synthetic
cacagctttttgcctcgctt

SEQ ID NO: 2929 - DNA, 20 bp, Artificial Sequence
  Synthetic
cacagctttttgcctcgctt

SEQ ID NO: 2930 - DNA, 20 bp, Artificial Sequence
  Synthetic
cacagctttttgcctcgctt

SEQ ID NO: 2931 - DNA, 20 bp, Artificial Sequence
  Synthetic
cacagctttttgcctcgctt

SEQ ID NO: 2932 - DNA, 20 bp, Artificial Sequence
  Synthetic
tccctccattcatcctccca

SEQ ID NO: 2933 - DNA, 20 bp, Artificial Sequence
  Synthetic
tccctccattcatcctccca

SEQ ID NO: 2934 - DNA, 20 bp, Artificial Sequence
  Synthetic
tccctccattcatcctccca

SEQ ID NO: 2935 - DNA, 20 bp, Artificial Sequence
  Synthetic
tccctccattcatcctccca

SEQ ID NO: 2936 - DNA, 20 bp, Artificial Sequence
  Synthetic
tccctccattcatcctccca

SEQ ID NO: 2937 - DNA, 20 bp, Artificial Sequence
  Synthetic
cctgcctgaatggagcttcc

SEQ ID NO: 2938 - DNA, 20 bp, Artificial Sequence
  Synthetic
cctgcctgaatggagcttcc

SEQ ID NO: 2939 - DNA, 20 bp, Artificial Sequence
  Synthetic
gtgcaatcaagcagaagccc

SEQ ID NO: 2940 - DNA, 20 bp, Artificial Sequence
  Synthetic
gtgcaatcaagcagaagccc

SEQ ID NO: 2941 - DNA, 20 bp, Artificial Sequence
  Synthetic
aggaagcggacaaaagacgt

SEQ ID NO: 2942 - DNA, 20 bp, Artificial Sequence
  Synthetic
aggaagcggacaaaagacgt

SEQ ID NO: 2943 - DNA, 20 bp, Artificial Sequence
  Synthetic
aggaagcggacaaaagacgt

SEQ ID NO: 2944 - DNA, 20 bp, Artificial Sequence
  Synthetic
aggaagcggacaaaagacgt

SEQ ID NO: 2945 - DNA, 20 bp, Artificial Sequence
  Synthetic
aggaagcggacaaaagacgt

SEQ ID NO: 2946 - DNA, 20 bp, Artificial Sequence
  Synthetic
aggaagcggacaaaagacgt

SEQ ID NO: 2947 - DNA, 20 bp, Artificial Sequence
  Synthetic
aggaagcggacaaaagacgt

SEQ ID NO: 2948 - DNA, 20 bp, Artificial Sequence
  Synthetic
aggaagcggacaaaagacgt

SEQ ID NO: 2949 - DNA, 20 bp, Artificial Sequence
  Synthetic
gaaagagctagcagcaacgc

SEQ ID NO: 2950 - DNA, 20 bp, Artificial Sequence
  Synthetic
aggaagcggacaaaagacgt

SEQ ID NO: 2951 - DNA, 20 bp, Artificial Sequence
  Synthetic
gaaagagctagcagcaacgc

SEQ ID NO: 2952 - DNA, 20 bp, Artificial Sequence
  Synthetic
gaaagagctagcagcaacgc

SEQ ID NO: 2953 - DNA, 20 bp, Artificial Sequence
  Synthetic
gaaagagctagcagcaacgc

SEQ ID NO: 2954 - DNA, 20 bp, Artificial Sequence
  Synthetic
acgtggctcagtaacatggg

SEQ ID NO: 2955 - DNA, 20 bp, Artificial Sequence
  Synthetic
tgagcactccaaaatccccc

SEQ ID NO: 2956 - DNA, 20 bp, Artificial Sequence
  Synthetic
gagcactccaaaatccccca

SEQ ID NO: 2957 - DNA, 20 bp, Artificial Sequence
  Synthetic
gagcactccaaaatccccca

SEQ ID NO: 2958 - DNA, 20 bp, Artificial Sequence
  Synthetic
gagcactccaaaatccccca

SEQ ID NO: 2959 - DNA, 20 bp, Artificial Sequence
  Synthetic
gagcactccaaaatccccca

SEQ ID NO: 2960 - DNA, 20 bp, Artificial Sequence
  Synthetic
gagcactccaaaatccccca

SEQ ID NO: 2961 - DNA, 20 bp, Artificial Sequence
  Synthetic
gagcactccaaaatccccca

SEQ ID NO: 2962 - DNA, 20 bp, Artificial Sequence
  Synthetic
caggaagctgcaggtcttca

SEQ ID NO: 2963 - DNA, 20 bp, Artificial Sequence
  Synthetic
caggaagctgcaggtcttca

SEQ ID NO: 2964 - DNA, 20 bp, Artificial Sequence
  Synthetic
caggaagctgcaggtcttca

SEQ ID NO: 2965 - DNA, 20 bp, Artificial Sequence
  Synthetic
caggaagctgcaggtcttca

SEQ ID NO: 2966 - DNA, 20 bp, Artificial Sequence
  Synthetic
caggaagctgcaggtcttca

SEQ ID NO: 2967 - DNA, 20 bp, Artificial Sequence
  Synthetic
caggaagctgcaggtcttca

SEQ ID NO: 2968 - DNA, 20 bp, Artificial Sequence
  Synthetic
caggaagctgcaggtcttca

SEQ ID NO: 2969 - DNA, 20 bp, Artificial Sequence
  Synthetic
caggaagctgcaggtcttca

SEQ ID NO: 2970 - DNA, 20 bp, Artificial Sequence
  Synthetic
caggaagctgcaggtcttca

SEQ ID NO: 2971 - DNA, 20 bp, Artificial Sequence
  Synthetic
gggaaggagggacatggaga

SEQ ID NO: 2972 - DNA, 20 bp, Artificial Sequence
  Synthetic
gggaaggagggacatggaga

SEQ ID NO: 2973 - DNA, 20 bp, Artificial Sequence
  Synthetic
gactgagcctgggatttgct

SEQ ID NO: 2974 - DNA, 20 bp, Artificial Sequence
  Synthetic
gactgagcctgggatttgct

SEQ ID NO: 2975 - DNA, 20 bp, Artificial Sequence
  Synthetic
gactgagcctgggatttgct

SEQ ID NO: 2976 - DNA, 20 bp, Artificial Sequence
  Synthetic
gactgagcctgggatttgct

SEQ ID NO: 2977 - DNA, 20 bp, Artificial Sequence
  Synthetic
gactgagcctgggatttgct

SEQ ID NO: 2978 - DNA, 20 bp, Artificial Sequence
  Synthetic
gactgagcctgggatttgct

SEQ ID NO: 2979 - DNA, 20 bp, Artificial Sequence
  Synthetic
gatgggctcatggtctctcg

SEQ ID NO: 2980 - DNA, 20 bp, Artificial Sequence
  Synthetic
gatgggctcatggtctctcg

SEQ ID NO: 2981 - DNA, 20 bp, Artificial Sequence
  Synthetic
gatgggctcatggtctctcg

SEQ ID NO: 2982 - DNA, 20 bp, Artificial Sequence
  Synthetic
gatgggctcatggtctctcg

SEQ ID NO: 2983 - DNA, 20 bp, Artificial Sequence
  Synthetic
gatgggctcatggtctctcg

SEQ ID NO: 2984 - DNA, 20 bp, Artificial Sequence
  Synthetic
gatgggctcatggtctctcg

SEQ ID NO: 2985 - DNA, 20 bp, Artificial Sequence
  Synthetic
gatgggctcatggtctctcg

SEQ ID NO: 2986 - DNA, 20 bp, Artificial Sequence
  Synthetic
gatgggctcatggtctctcg

SEQ ID NO: 2987 - DNA, 20 bp, Artificial Sequence
  Synthetic
gatgggctcatggtctctcg

SEQ ID NO: 2988 - DNA, 20 bp, Artificial Sequence
  Synthetic
gatgggctcatggtctctcg

SEQ ID NO: 2989 - DNA, 20 bp, Artificial Sequence
  Synthetic
gatgggctcatggtctctcg

SEQ ID NO: 2990 - DNA, 20 bp, Artificial Sequence
  Synthetic
gatgggctcatggtctctcg

SEQ ID NO: 2991 - DNA, 20 bp, Artificial Sequence
  Synthetic
ggtgctgttcccatgctttg

SEQ ID NO: 2992 - DNA, 20 bp, Artificial Sequence
  Synthetic
gtgctgttcccatgctttgg

SEQ ID NO: 2993 - DNA, 20 bp, Artificial Sequence
  Synthetic
gtgctgttcccatgctttgg

SEQ ID NO: 2994 - DNA, 20 bp, Artificial Sequence
  Synthetic
gtgctgttcccatgctttgg

SEQ ID NO: 2995 - DNA, 20 bp, Artificial Sequence
  Synthetic
gtgctgttcccatgctttgg

SEQ ID NO: 2996 - DNA, 20 bp, Artificial Sequence
  Synthetic
gtgctgttcccatgctttgg

SEQ ID NO: 2997 - DNA, 20 bp, Artificial Sequence
  Synthetic
gtgctgttcccatgctttgg

SEQ ID NO: 2998 - DNA, 20 bp, Artificial Sequence
  Synthetic
gtgctgttcccatgctttgg

SEQ ID NO: 2999 - DNA, 20 bp, Artificial Sequence
  Synthetic
gtgctgttcccatgctttgg

SEQ ID NO: 3000 - DNA, 20 bp, Artificial Sequence
  Synthetic
gtgctgttcccatgctttgg

SEQ ID NO: 3001 - DNA, 20 bp, Artificial Sequence
  Synthetic
gtgctgttcccatgctttgg

SEQ ID NO: 3002 - DNA, 20 bp, Artificial Sequence
  Synthetic
gtgctgttcccatgctttgg

SEQ ID NO: 3003 - DNA, 20 bp, Artificial Sequence
  Synthetic
gtgctgttcccatgctttgg

SEQ ID NO: 3004 - DNA, 20 bp, Artificial Sequence
  Synthetic
gtgctgttcccatgctttgg

SEQ ID NO: 3005 - DNA, 20 bp, Artificial Sequence
  Synthetic
ctgagttgctgcagttgctg

SEQ ID NO: 3006 - DNA, 20 bp, Artificial Sequence
  Synthetic
ctgagttgctgcagttgctg

SEQ ID NO: 3007 - DNA, 20 bp, Artificial Sequence
  Synthetic
agtctgggctaatgggttgc

SEQ ID NO: 3008 - DNA, 20 bp, Artificial Sequence
  Synthetic
agtctgggctaatgggttgc

SEQ ID NO: 3009 - DNA, 20 bp, Artificial Sequence
  Synthetic
agtctgggctaatgggttgc

SEQ ID NO: 3010 - DNA, 20 bp, Artificial Sequence
  Synthetic
agtctgggctaatgggttgc

SEQ ID NO: 3011 - DNA, 20 bp, Artificial Sequence
  Synthetic
agtctgggctaatgggttgc

SEQ ID NO: 3012 - DNA, 20 bp, Artificial Sequence
  Synthetic
agtctgggctaatgggttgc

SEQ ID NO: 3013 - DNA, 20 bp, Artificial Sequence
  Synthetic
agtctgggctaatgggttgc

SEQ ID NO: 3014 - DNA, 20 bp, Artificial Sequence
  Synthetic
agtctgggctaatgggttgc

SEQ ID NO: 3015 - DNA, 20 bp, Artificial Sequence
  Synthetic
agtctgggctaatgggttgc

SEQ ID NO: 3016 - DNA, 20 bp, Artificial Sequence
  Synthetic
agtctgggctaatgggttgc

SEQ ID NO: 3017 - DNA, 20 bp, Artificial Sequence
  Synthetic
agtctgggctaatgggttgc

SEQ ID NO: 3018 - DNA, 20 bp, Artificial Sequence
  Synthetic
agtctgggctaatgggttgc

SEQ ID NO: 3019 - DNA, 20 bp, Artificial Sequence
  Synthetic
agtctgggctaatgggttgc

SEQ ID NO: 3020 - DNA, 20 bp, Artificial Sequence
  Synthetic
agtctgggctaatgggttgc

SEQ ID NO: 3021 - DNA, 20 bp, Artificial Sequence
  Synthetic
agtctgggctaatgggttgc

SEQ ID NO: 3022 - DNA, 20 bp, Artificial Sequence
  Synthetic
agtctgggctaatgggttgc

SEQ ID NO: 3023 - DNA, 20 bp, Artificial Sequence
  Synthetic
cctgctttcttgtgcctcct

SEQ ID NO: 3024 - DNA, 20 bp, Artificial Sequence
  Synthetic
cctgctttcttgtgcctcct

SEQ ID NO: 3025 - DNA, 20 bp, Artificial Sequence
  Synthetic
agtctgggctaatgggttgc

SEQ ID NO: 3026 - DNA, 20 bp, Artificial Sequence
  Synthetic
gttgtgtgtctggtctggct

SEQ ID NO: 3027 - DNA, 20 bp, Artificial Sequence
  Synthetic
gttgtgtgtctggtctggct

SEQ ID NO: 3028 - DNA, 20 bp, Artificial Sequence
  Synthetic
gttgtgtgtctggtctggct

SEQ ID NO: 3029 - DNA, 20 bp, Artificial Sequence
  Synthetic
gttgtgtgtctggtctggct

SEQ ID NO: 3030 - DNA, 20 bp, Artificial Sequence
  Synthetic
gttgtgtgtctggtctggct

SEQ ID NO: 3031 - DNA, 20 bp, Artificial Sequence
  Synthetic
gttgtgtgtctggtctggct

SEQ ID NO: 3032 - DNA, 20 bp, Artificial Sequence
  Synthetic
gttgtgtgtctggtctggct

SEQ ID NO: 3033 - DNA, 20 bp, Artificial Sequence
  Synthetic
gttgtgtgtctggtctggct

SEQ ID NO: 3034 - DNA, 20 bp, Artificial Sequence
  Synthetic
catgtggatgtctgggctgt

SEQ ID NO: 3035 - DNA, 20 bp, Artificial Sequence
  Synthetic
catgtggatgtctgggctgt

SEQ ID NO: 3036 - DNA, 20 bp, Artificial Sequence
  Synthetic
catgtggatgtctgggctgt

SEQ ID NO: 3037 - DNA, 20 bp, Artificial Sequence
  Synthetic
catgtggatgtctgggctgt

SEQ ID NO: 3038 - DNA, 20 bp, Artificial Sequence
  Synthetic
catgtggatgtctgggctgt

SEQ ID NO: 3039 - DNA, 20 bp, Artificial Sequence
  Synthetic
tcttggctctcagcaccttg

SEQ ID NO: 3040 - DNA, 20 bp, Artificial Sequence
  Synthetic
tcttggctctcagcaccttg

SEQ ID NO: 3041 - DNA, 20 bp, Artificial Sequence
  Synthetic
tcttggctctcagcaccttg

SEQ ID NO: 3042 - DNA, 20 bp, Artificial Sequence
  Synthetic
tcttggctctcagcaccttg

SEQ ID NO: 3043 - DNA, 20 bp, Artificial Sequence
  Synthetic
tcttggctctcagcaccttg

SEQ ID NO: 3044 - DNA, 20 bp, Artificial Sequence
  Synthetic
tcttggctctcagcaccttg

SEQ ID NO: 3045 - DNA, 20 bp, Artificial Sequence
  Synthetic
tcttggctctcagcaccttg

SEQ ID NO: 3046 - DNA, 20 bp, Artificial Sequence
  Synthetic
tcttggctctcagcaccttg

SEQ ID NO: 3047 - DNA, 20 bp, Artificial Sequence
  Synthetic
tcttggctctcagcaccttg

SEQ ID NO: 3048 - DNA, 20 bp, Artificial Sequence
  Synthetic
tcttggctctcagcaccttg

SEQ ID NO: 3049 - DNA, 20 bp, Artificial Sequence
  Synthetic
ctttatgtcccggggaggtg

SEQ ID NO: 3050 - DNA, 20 bp, Artificial Sequence
  Synthetic
ctttatgtcccggggaggtg

SEQ ID NO: 3051 - DNA, 20 bp, Artificial Sequence
  Synthetic
ctttatgtcccggggaggtg

SEQ ID NO: 3052 - DNA, 20 bp, Artificial Sequence
  Synthetic
ctttatgtcccggggaggtg

SEQ ID NO: 3053 - DNA, 20 bp, Artificial Sequence
  Synthetic
ctttatgtcccggggaggtg

SEQ ID NO: 3054 - DNA, 20 bp, Artificial Sequence
  Synthetic
ctttatgtcccggggaggtg

SEQ ID NO: 3055 - DNA, 20 bp, Artificial Sequence
  Synthetic
gtcaaaccctcacaggctca

SEQ ID NO: 3056 - DNA, 20 bp, Artificial Sequence
  Synthetic
gtcaaaccctcacaggctca

SEQ ID NO: 3057 - DNA, 20 bp, Artificial Sequence
  Synthetic
cagtgccagcaagactagct

SEQ ID NO: 3058 - DNA, 20 bp, Artificial Sequence
  Synthetic
cagtgccagcaagactagct

SEQ ID NO: 3059 - DNA, 20 bp, Artificial Sequence
  Synthetic
cagtgccagcaagactagct

SEQ ID NO: 3060 - DNA, 20 bp, Artificial Sequence
  Synthetic
cagtgccagcaagactagct

SEQ ID NO: 3061 - DNA, 20 bp, Artificial Sequence
  Synthetic
tgcgcctggctaatttgttg

SEQ ID NO: 3062 - DNA, 20 bp, Artificial Sequence
  Synthetic
tgcgcctggctaatttgttg

SEQ ID NO: 3063 - DNA, 20 bp, Artificial Sequence
  Synthetic
tgcgcctggctaatttgttg

SEQ ID NO: 3064 - DNA, 20 bp, Artificial Sequence
  Synthetic
tgcgcctggctaatttgttg

SEQ ID NO: 3065 - DNA, 20 bp, Artificial Sequence
  Synthetic
tccctgtctttcaaagcgct

SEQ ID NO: 3066 - DNA, 20 bp, Artificial Sequence
  Synthetic
ccctgccccttgttactttc

SEQ ID NO: 3067 - DNA, 20 bp, Artificial Sequence
  Synthetic
ccctgccccttgttactttc

SEQ ID NO: 3068 - DNA, 20 bp, Artificial Sequence
  Synthetic
ccctgccccttgttactttc

SEQ ID NO: 3069 - DNA, 20 bp, Artificial Sequence
  Synthetic
ccctgccccttgttactttc

SEQ ID NO: 3070 - DNA, 20 bp, Artificial Sequence
  Synthetic
ccctgccccttgttactttc

SEQ ID NO: 3071 - DNA, 20 bp, Artificial Sequence
  Synthetic
ccctgccccttgttactttc

SEQ ID NO: 3072 - DNA, 20 bp, Artificial Sequence
  Synthetic
ccctgccccttgttactttc

SEQ ID NO: 3073 - DNA, 20 bp, Artificial Sequence
  Synthetic
ccctgccccttgttactttc

SEQ ID NO: 3074 - DNA, 20 bp, Artificial Sequence
  Synthetic
ccctgccccttgttactttc

SEQ ID NO: 3075 - DNA, 20 bp, Artificial Sequence
  Synthetic
ccctgccccttgttactttc

SEQ ID NO: 3076 - DNA, 20 bp, Artificial Sequence
  Synthetic
ccctgccccttgttactttc

SEQ ID NO: 3077 - DNA, 20 bp, Artificial Sequence
  Synthetic
ccctgccccttgttactttc

SEQ ID NO: 3078 - DNA, 20 bp, Artificial Sequence
  Synthetic
ccctgccccttgttactttc

SEQ ID NO: 3079 - DNA, 20 bp, Artificial Sequence
  Synthetic
ccctgccccttgttactttc

SEQ ID NO: 3080 - DNA, 20 bp, Artificial Sequence
  Synthetic
ccctgccccttgttactttc

SEQ ID NO: 3081 - DNA, 20 bp, Artificial Sequence
  Synthetic
ccctgccccttgttactttc

SEQ ID NO: 3082 - DNA, 20 bp, Artificial Sequence
  Synthetic
ccctgccccttgttactttc

SEQ ID NO: 3083 - DNA, 20 bp, Artificial Sequence
  Synthetic
ccctgccccttgttactttc

SEQ ID NO: 3084 - DNA, 20 bp, Artificial Sequence
  Synthetic
ccctgccccttgttactttc

SEQ ID NO: 3085 - DNA, 21 bp, Artificial Sequence
  Synthetic
ctcatttggaaagtgggcatt

SEQ ID NO: 3086 - DNA, 21 bp, Artificial Sequence
  Synthetic
ctcatttggaaagtgggcatt

SEQ ID NO: 3087 - DNA, 21 bp, Artificial Sequence
  Synthetic
ctcatttggaaagtgggcatt

SEQ ID NO: 3088 - DNA, 21 bp, Artificial Sequence
  Synthetic
ctcatttggaaagtgggcatt

SEQ ID NO: 3089 - DNA, 21 bp, Artificial Sequence
  Synthetic
ctcatttggaaagtgggcatt

SEQ ID NO: 3090 - DNA, 21 bp, Artificial Sequence
  Synthetic
ctcatttggaaagtgggcatt

SEQ ID NO: 3091 - DNA, 21 bp, Artificial Sequence
  Synthetic
ctcatttggaaagtgggcatt

SEQ ID NO: 3092 - DNA, 21 bp, Artificial Sequence
  Synthetic
ctcatttggaaagtgggcatt

SEQ ID NO: 3093 - DNA, 21 bp, Artificial Sequence
  Synthetic
ctcatttggaaagtgggcatt

SEQ ID NO: 3094 - DNA, 21 bp, Artificial Sequence
  Synthetic
ctcatttggaaagtgggcatt

SEQ ID NO: 3095 - DNA, 21 bp, Artificial Sequence
  Synthetic
ctcatttggaaagtgggcatt

SEQ ID NO: 3096 - DNA, 21 bp, Artificial Sequence
  Synthetic
ctcatttggaaagtgggcatt

SEQ ID NO: 3097 - DNA, 21 bp, Artificial Sequence
  Synthetic
ctcatttggaaagtgggcatt

SEQ ID NO: 3098 - DNA, 21 bp, Artificial Sequence
  Synthetic
ctcatttggaaagtgggcatt

SEQ ID NO: 3099 - DNA, 21 bp, Artificial Sequence
  Synthetic
ctcatttggaaagtgggcatt

SEQ ID NO: 3100 - DNA, 21 bp, Artificial Sequence
  Synthetic
ctcatttggaaagtgggcatt

SEQ ID NO: 3101 - DNA, 21 bp, Artificial Sequence
  Synthetic
ctcatttggaaagtgggcatt

SEQ ID NO: 3102 - DNA, 21 bp, Artificial Sequence
  Synthetic
ctcatttggaaagtgggcatt

SEQ ID NO: 3103 - DNA, 21 bp, Artificial Sequence
  Synthetic
ctcatttggaaagtgggcatt

SEQ ID NO: 3104 - DNA, 21 bp, Artificial Sequence
  Synthetic
ctcatttggaaagtgggcatt

SEQ ID NO: 3105 - DNA, 21 bp, Artificial Sequence
  Synthetic
ctcatttggaaagtgggcatt

SEQ ID NO: 3106 - DNA, 21 bp, Artificial Sequence
  Synthetic
ctcatttggaaagtgggcatt

SEQ ID NO: 3107 - DNA, 21 bp, Artificial Sequence
  Synthetic
ctcatttggaaagtgggcatt

SEQ ID NO: 3108 - DNA, 21 bp, Artificial Sequence
  Synthetic
ctcatttggaaagtgggcatt

SEQ ID NO: 3109 - DNA, 21 bp, Artificial Sequence
  Synthetic
ctcatttggaaagtgggcatt

SEQ ID NO: 3110 - DNA, 21 bp, Artificial Sequence
  Synthetic
ctcatttggaaagtgggcatt

SEQ ID NO: 3111 - DNA, 21 bp, Artificial Sequence
  Synthetic
ctcatttggaaagtgggcatt

SEQ ID NO: 3112 - DNA, 20 bp, Artificial Sequence
  Synthetic
gaccctttgctcctttcaca

SEQ ID NO: 3113 - DNA, 20 bp, Artificial Sequence
  Synthetic
gaccctttgctcctttcaca

SEQ ID NO: 3114 - DNA, 20 bp, Artificial Sequence
  Synthetic
gaccctttgctcctttcaca

SEQ ID NO: 3115 - DNA, 20 bp, Artificial Sequence
  Synthetic
gaccctttgctcctttcaca

SEQ ID NO: 3116 - DNA, 20 bp, Artificial Sequence
  Synthetic
gaccctttgctcctttcaca

SEQ ID NO: 3117 - DNA, 20 bp, Artificial Sequence
  Synthetic
gaccctttgctcctttcaca

SEQ ID NO: 3118 - DNA, 20 bp, Artificial Sequence
  Synthetic
gaccctttgctcctttcaca

SEQ ID NO: 3119 - DNA, 20 bp, Artificial Sequence
  Synthetic
gaccctttgctcctttcaca

SEQ ID NO: 3120 - DNA, 20 bp, Artificial Sequence
  Synthetic
gaccctttgctcctttcaca

SEQ ID NO: 3121 - DNA, 20 bp, Artificial Sequence
  Synthetic
gaccctttgctcctttcaca

SEQ ID NO: 3122 - DNA, 20 bp, Artificial Sequence
  Synthetic
gaccctttgctcctttcaca

SEQ ID NO: 3123 - DNA, 20 bp, Artificial Sequence
  Synthetic
gaccctttgctcctttcaca

SEQ ID NO: 3124 - DNA, 20 bp, Artificial Sequence
  Synthetic
gaccctttgctcctttcaca

SEQ ID NO: 3125 - DNA, 20 bp, Artificial Sequence
  Synthetic
gaccctttgctcctttcaca

SEQ ID NO: 3126 - DNA, 20 bp, Artificial Sequence
  Synthetic
gaccctttgctcctttcaca

SEQ ID NO: 3127 - DNA, 20 bp, Artificial Sequence
  Synthetic
gaccctttgctcctttcaca

SEQ ID NO: 3128 - DNA, 20 bp, Artificial Sequence
  Synthetic
gaccctttgctcctttcaca

SEQ ID NO: 3129 - DNA, 20 bp, Artificial Sequence
  Synthetic
gaccctttgctcctttcaca

SEQ ID NO: 3130 - DNA, 20 bp, Artificial Sequence
  Synthetic
gaccctttgctcctttcaca

SEQ ID NO: 3131 - DNA, 20 bp, Artificial Sequence
  Synthetic
gaccctttgctcctttcaca

SEQ ID NO: 3132 - DNA, 20 bp, Artificial Sequence
  Synthetic
gaccctttgctcctttcaca

SEQ ID NO: 3133 - DNA, 20 bp, Artificial Sequence
  Synthetic
gaccctttgctcctttcaca

SEQ ID NO: 3134 - DNA, 20 bp, Artificial Sequence
  Synthetic
gaccctttgctcctttcaca

SEQ ID NO: 3135 - DNA, 20 bp, Artificial Sequence
  Synthetic
gaccctttgctcctttcaca

SEQ ID NO: 3136 - DNA, 20 bp, Artificial Sequence
  Synthetic
gaccctttgctcctttcaca

SEQ ID NO: 3137 - DNA, 20 bp, Artificial Sequence
  Synthetic
gaccctttgctcctttcaca

SEQ ID NO: 3138 - DNA, 20 bp, Artificial Sequence
  Synthetic
gaccctttgctcctttcaca

SEQ ID NO: 3139 - DNA, 20 bp, Artificial Sequence
  Synthetic
gaccctttgctcctttcaca

SEQ ID NO: 3140 - DNA, 20 bp, Artificial Sequence
  Synthetic
gaccctttgctcctttcaca

SEQ ID NO: 3141 - DNA, 20 bp, Artificial Sequence
  Synthetic
gaccctttgctcctttcaca

SEQ ID NO: 3142 - DNA, 20 bp, Artificial Sequence
  Synthetic
gaccctttgctcctttcaca

SEQ ID NO: 3143 - DNA, 21 bp, Artificial Sequence
  Synthetic
gagagctggagttcatgaagg

SEQ ID NO: 3144 - DNA, 21 bp, Artificial Sequence
  Synthetic
gagagctggagttcatgaagg

SEQ ID NO: 3145 - DNA, 21 bp, Artificial Sequence
  Synthetic
gagagctggagttcatgaagg

SEQ ID NO: 3146 - DNA, 21 bp, Artificial Sequence
  Synthetic
gagagctggagttcatgaagg

SEQ ID NO: 3147 - DNA, 21 bp, Artificial Sequence
  Synthetic
gagagctggagttcatgaagg

SEQ ID NO: 3148 - DNA, 21 bp, Artificial Sequence
  Synthetic
gagagctggagttcatgaagg

SEQ ID NO: 3149 - DNA, 21 bp, Artificial Sequence
  Synthetic
gagagctggagttcatgaagg

SEQ ID NO: 3150 - DNA, 21 bp, Artificial Sequence
  Synthetic
gagagctggagttcatgaagg

SEQ ID NO: 3151 - DNA, 21 bp, Artificial Sequence
  Synthetic
gagagctggagttcatgaagg

SEQ ID NO: 3152 - DNA, 21 bp, Artificial Sequence
  Synthetic
gagagctggagttcatgaagg

SEQ ID NO: 3153 - DNA, 21 bp, Artificial Sequence
  Synthetic
gagagctggagttcatgaagg

SEQ ID NO: 3154 - DNA, 21 bp, Artificial Sequence
  Synthetic
gagagctggagttcatgaagg

SEQ ID NO: 3155 - DNA, 21 bp, Artificial Sequence
  Synthetic
gagagctggagttcatgaagg

SEQ ID NO: 3156 - DNA, 21 bp, Artificial Sequence
  Synthetic
gagagctggagttcatgaagg

SEQ ID NO: 3157 - DNA, 21 bp, Artificial Sequence
  Synthetic
gagagctggagttcatgaagg

SEQ ID NO: 3158 - DNA, 21 bp, Artificial Sequence
  Synthetic
gagagctggagttcatgaagg

SEQ ID NO: 3159 - DNA, 21 bp, Artificial Sequence
  Synthetic
gagagctggagttcatgaagg

SEQ ID NO: 3160 - DNA, 21 bp, Artificial Sequence
  Synthetic
gagagctggagttcatgaagg

SEQ ID NO: 3161 - DNA, 21 bp, Artificial Sequence
  Synthetic
gagagctggagttcatgaagg

SEQ ID NO: 3162 - DNA, 21 bp, Artificial Sequence
  Synthetic
gagagctggagttcatgaagg

SEQ ID NO: 3163 - DNA, 21 bp, Artificial Sequence
  Synthetic
gagagctggagttcatgaagg

SEQ ID NO: 3164 - DNA, 21 bp, Artificial Sequence
  Synthetic
gagagctggagttcatgaagg

SEQ ID NO: 3165 - DNA, 21 bp, Artificial Sequence
  Synthetic
gagagctggagttcatgaagg

SEQ ID NO: 3166 - DNA, 21 bp, Artificial Sequence
  Synthetic
gagagctggagttcatgaagg

SEQ ID NO: 3167 - DNA, 21 bp, Artificial Sequence
  Synthetic
gagagctggagttcatgaagg

SEQ ID NO: 3168 - DNA, 21 bp, Artificial Sequence
  Synthetic
gagagctggagttcatgaagg

SEQ ID NO: 3169 - DNA, 21 bp, Artificial Sequence
  Synthetic
gagagctggagttcatgaagg

SEQ ID NO: 3170 - DNA, 21 bp, Artificial Sequence
  Synthetic
gagagctggagttcatgaagg

SEQ ID NO: 3171 - DNA, 21 bp, Artificial Sequence
  Synthetic
gagagctggagttcatgaagg

SEQ ID NO: 3172 - DNA, 21 bp, Artificial Sequence
  Synthetic
gagagctggagttcatgaagg

SEQ ID NO: 3173 - DNA, 21 bp, Artificial Sequence
  Synthetic
gagagctggagttcatgaagg

SEQ ID NO: 3174 - DNA, 21 bp, Artificial Sequence
  Synthetic
gagagctggagttcatgaagg

SEQ ID NO: 3175 - DNA, 21 bp, Artificial Sequence
  Synthetic
gagagctggagttcatgaagg

SEQ ID NO: 3176 - DNA, 21 bp, Artificial Sequence
  Synthetic
gagagctggagttcatgaagg

SEQ ID NO: 3177 - DNA, 21 bp, Artificial Sequence
  Synthetic
gagagctggagttcatgaagg

SEQ ID NO: 3178 - DNA, 21 bp, Artificial Sequence
  Synthetic
gagagctggagttcatgaagg

SEQ ID NO: 3179 - DNA, 21 bp, Artificial Sequence
  Synthetic
gagagctggagttcatgaagg

SEQ ID NO: 3180 - DNA, 21 bp, Artificial Sequence
  Synthetic
gagagctggagttcatgaagg

SEQ ID NO: 3181 - DNA, 21 bp, Artificial Sequence
  Synthetic
gagagctggagttcatgaagg

SEQ ID NO: 3182 - DNA, 21 bp, Artificial Sequence
  Synthetic
gagagctggagttcatgaagg

SEQ ID NO: 3183 - DNA, 21 bp, Artificial Sequence
  Synthetic
gagagctggagttcatgaagg

SEQ ID NO: 3184 - DNA, 21 bp, Artificial Sequence
  Synthetic
gagagctggagttcatgaagg

SEQ ID NO: 3185 - DNA, 21 bp, Artificial Sequence
  Synthetic
gagagctggagttcatgaagg

SEQ ID NO: 3186 - DNA, 21 bp, Artificial Sequence
  Synthetic
gagagctggagttcatgaagg

SEQ ID NO: 3187 - DNA, 21 bp, Artificial Sequence
  Synthetic
gagagctggagttcatgaagg

SEQ ID NO: 3188 - DNA, 21 bp, Artificial Sequence
  Synthetic
gagagctggagttcatgaagg

SEQ ID NO: 3189 - DNA, 21 bp, Artificial Sequence
  Synthetic
gagagctggagttcatgaagg

SEQ ID NO: 3190 - DNA, 21 bp, Artificial Sequence
  Synthetic
gagagctggagttcatgaagg

SEQ ID NO: 3191 - DNA, 21 bp, Artificial Sequence
  Synthetic
gagagctggagttcatgaagg

SEQ ID NO: 3192 - DNA, 20 bp, Artificial Sequence
  Synthetic
ggtgctgttcccatgctttg

SEQ ID NO: 3193 - DNA, 20 bp, Artificial Sequence
  Synthetic
ggtgctgttcccatgctttg

SEQ ID NO: 3194 - DNA, 20 bp, Artificial Sequence
  Synthetic
ggtgctgttcccatgctttg

SEQ ID NO: 3195 - DNA, 20 bp, Artificial Sequence
  Synthetic
ggtgctgttcccatgctttg

SEQ ID NO: 3196 - DNA, 20 bp, Artificial Sequence
  Synthetic
ggtgctgttcccatgctttg

SEQ ID NO: 3197 - DNA, 20 bp, Artificial Sequence
  Synthetic
ggtgctgttcccatgctttg

SEQ ID NO: 3198 - DNA, 20 bp, Artificial Sequence
  Synthetic
ggtgctgttcccatgctttg

SEQ ID NO: 3199 - DNA, 20 bp, Artificial Sequence
  Synthetic
ggtgctgttcccatgctttg

SEQ ID NO: 3200 - DNA, 20 bp, Artificial Sequence
  Synthetic
ggtgctgttcccatgctttg

SEQ ID NO: 3201 - DNA, 20 bp, Artificial Sequence
  Synthetic
ggtgctgttcccatgctttg

SEQ ID NO: 3202 - DNA, 20 bp, Artificial Sequence
  Synthetic
ggtgctgttcccatgctttg

SEQ ID NO: 3203 - DNA, 20 bp, Artificial Sequence
  Synthetic
ggtgctgttcccatgctttg

SEQ ID NO: 3204 - DNA, 20 bp, Artificial Sequence
  Synthetic
ggtgctgttcccatgctttg

SEQ ID NO: 3205 - DNA, 20 bp, Artificial Sequence
  Synthetic
ggtgctgttcccatgctttg

SEQ ID NO: 3206 - DNA, 20 bp, Artificial Sequence
  Synthetic
ggtgctgttcccatgctttg

SEQ ID NO: 3207 - DNA, 20 bp, Artificial Sequence
  Synthetic
ggtgctgttcccatgctttg

SEQ ID NO: 3208 - DNA, 20 bp, Artificial Sequence
  Synthetic
ggtgctgttcccatgctttg

SEQ ID NO: 3209 - DNA, 20 bp, Artificial Sequence
  Synthetic
ggtgctgttcccatgctttg

SEQ ID NO: 3210 - DNA, 20 bp, Artificial Sequence
  Synthetic
ggtgctgttcccatgctttg

SEQ ID NO: 3211 - DNA, 20 bp, Artificial Sequence
  Synthetic
ggtgctgttcccatgctttg

SEQ ID NO: 3212 - DNA, 20 bp, Artificial Sequence
  Synthetic
ggtgctgttcccatgctttg

SEQ ID NO: 3213 - DNA, 20 bp, Artificial Sequence
  Synthetic
ggtgctgttcccatgctttg

SEQ ID NO: 3214 - DNA, 20 bp, Artificial Sequence
  Synthetic
ggtgctgttcccatgctttg

SEQ ID NO: 3215 - DNA, 20 bp, Artificial Sequence
  Synthetic
ggtgctgttcccatgctttg

SEQ ID NO: 3216 - DNA, 20 bp, Artificial Sequence
  Synthetic
ggtgctgttcccatgctttg

SEQ ID NO: 3217 - DNA, 20 bp, Artificial Sequence
  Synthetic
ggtgctgttcccatgctttg

SEQ ID NO: 3218 - DNA, 20 bp, Artificial Sequence
  Synthetic
ggtgctgttcccatgctttg

SEQ ID NO: 3219 - DNA, 20 bp, Artificial Sequence
  Synthetic
ggtgctgttcccatgctttg

SEQ ID NO: 3220 - DNA, 20 bp, Artificial Sequence
  Synthetic
ggtgctgttcccatgctttg

SEQ ID NO: 3221 - DNA, 20 bp, Artificial Sequence
  Synthetic
ggtgctgttcccatgctttg

SEQ ID NO: 3222 - DNA, 20 bp, Artificial Sequence
  Synthetic
ggtgctgttcccatgctttg

SEQ ID NO: 3223 - DNA, 20 bp, Artificial Sequence
  Synthetic
ctggagggaagggttagctc

SEQ ID NO: 3224 - DNA, 20 bp, Artificial Sequence
  Synthetic
ctggagggaagggttagctc

SEQ ID NO: 3225 - DNA, 20 bp, Artificial Sequence
  Synthetic
ctggagggaagggttagctc

SEQ ID NO: 3226 - DNA, 20 bp, Artificial Sequence
  Synthetic
ctggagggaagggttagctc

SEQ ID NO: 3227 - DNA, 20 bp, Artificial Sequence
  Synthetic
ctggagggaagggttagctc

SEQ ID NO: 3228 - DNA, 20 bp, Artificial Sequence
  Synthetic
ctggagggaagggttagctc

SEQ ID NO: 3229 - DNA, 20 bp, Artificial Sequence
  Synthetic
ctggagggaagggttagctc

SEQ ID NO: 3230 - DNA, 20 bp, Artificial Sequence
  Synthetic
ctggagggaagggttagctc

SEQ ID NO: 3231 - DNA, 20 bp, Artificial Sequence
  Synthetic
ctggagggaagggttagctc

SEQ ID NO: 3232 - DNA, 20 bp, Artificial Sequence
  Synthetic
ctggagggaagggttagctc

SEQ ID NO: 3233 - DNA, 20 bp, Artificial Sequence
  Synthetic
ctggagggaagggttagctc

SEQ ID NO: 3234 - DNA, 20 bp, Artificial Sequence
  Synthetic
ctggagggaagggttagctc

SEQ ID NO: 3235 - DNA, 20 bp, Artificial Sequence
  Synthetic
ctggagggaagggttagctc

SEQ ID NO: 3236 - DNA, 20 bp, Artificial Sequence
  Synthetic
ctggagggaagggttagctc

SEQ ID NO: 3237 - DNA, 20 bp, Artificial Sequence
  Synthetic
ctggagggaagggttagctc

SEQ ID NO: 3238 - DNA, 20 bp, Artificial Sequence
  Synthetic
ttgagcgtgtgggtttcaag

SEQ ID NO: 3239 - DNA, 20 bp, Artificial Sequence
  Synthetic
ttgagcgtgtgggtttcaag

SEQ ID NO: 3240 - DNA, 20 bp, Artificial Sequence
  Synthetic
ttgagcgtgtgggtttcaag

SEQ ID NO: 3241 - DNA, 20 bp, Artificial Sequence
  Synthetic
ttgagcgtgtgggtttcaag

SEQ ID NO: 3242 - DNA, 20 bp, Artificial Sequence
  Synthetic
ttgagcgtgtgggtttcaag

SEQ ID NO: 3243 - DNA, 20 bp, Artificial Sequence
  Synthetic
ttgagcgtgtgggtttcaag

SEQ ID NO: 3244 - DNA, 20 bp, Artificial Sequence
  Synthetic
ttgagcgtgtgggtttcaag

SEQ ID NO: 3245 - DNA, 20 bp, Artificial Sequence
  Synthetic
ttgagcgtgtgggtttcaag

SEQ ID NO: 3246 - DNA, 20 bp, Artificial Sequence
  Synthetic
ttgagcgtgtgggtttcaag

SEQ ID NO: 3247 - DNA, 20 bp, Artificial Sequence
  Synthetic
ttgagcgtgtgggtttcaag

SEQ ID NO: 3248 - DNA, 20 bp, Artificial Sequence
  Synthetic
ttgagcgtgtgggtttcaag

SEQ ID NO: 3249 - DNA, 20 bp, Artificial Sequence
  Synthetic
ttgagcgtgtgggtttcaag

SEQ ID NO: 3250 - DNA, 20 bp, Artificial Sequence
  Synthetic
ttgagcgtgtgggtttcaag

SEQ ID NO: 3251 - DNA, 20 bp, Artificial Sequence
  Synthetic
ttgagcgtgtgggtttcaag

SEQ ID NO: 3252 - DNA, 20 bp, Artificial Sequence
  Synthetic
ttgagcgtgtgggtttcaag

SEQ ID NO: 3253 - DNA, 20 bp, Artificial Sequence
  Synthetic
ttgagcgtgtgggtttcaag

SEQ ID NO: 3254 - DNA, 20 bp, Artificial Sequence
  Synthetic
ttgagcgtgtgggtttcaag

SEQ ID NO: 3255 - DNA, 20 bp, Artificial Sequence
  Synthetic
ttgagcgtgtgggtttcaag

SEQ ID NO: 3256 - DNA, 20 bp, Artificial Sequence
  Synthetic
ttgagcgtgtgggtttcaag

SEQ ID NO: 3257 - DNA, 20 bp, Artificial Sequence
  Synthetic
tcacctttcactcactcccc

SEQ ID NO: 3258 - DNA, 20 bp, Artificial Sequence
  Synthetic
tcacctttcactcactcccc

SEQ ID NO: 3259 - DNA, 20 bp, Artificial Sequence
  Synthetic
tcacctttcactcactcccc

SEQ ID NO: 3260 - DNA, 20 bp, Artificial Sequence
  Synthetic
tcacctttcactcactcccc

SEQ ID NO: 3261 - DNA, 20 bp, Artificial Sequence
  Synthetic
tcacctttcactcactcccc

SEQ ID NO: 3262 - DNA, 20 bp, Artificial Sequence
  Synthetic
tcacctttcactcactcccc

SEQ ID NO: 3263 - DNA, 20 bp, Artificial Sequence
  Synthetic
tcacctttcactcactcccc

SEQ ID NO: 3264 - DNA, 20 bp, Artificial Sequence
  Synthetic
tcacctttcactcactcccc

SEQ ID NO: 3265 - DNA, 20 bp, Artificial Sequence
  Synthetic
tcacctttcactcactcccc

SEQ ID NO: 3266 - DNA, 20 bp, Artificial Sequence
  Synthetic
tcacctttcactcactcccc

SEQ ID NO: 3267 - DNA, 20 bp, Artificial Sequence
  Synthetic
tcacctttcactcactcccc

SEQ ID NO: 3268 - DNA, 20 bp, Artificial Sequence
  Synthetic
tcacctttcactcactcccc

SEQ ID NO: 3269 - DNA, 20 bp, Artificial Sequence
  Synthetic
tcacctttcactcactcccc

SEQ ID NO: 3270 - DNA, 20 bp, Artificial Sequence
  Synthetic
tcacctttcactcactcccc

SEQ ID NO: 3271 - DNA, 20 bp, Artificial Sequence
  Synthetic
tcacctttcactcactcccc

SEQ ID NO: 3272 - DNA, 20 bp, Artificial Sequence
  Synthetic
tcacctttcactcactcccc

SEQ ID NO: 3273 - DNA, 20 bp, Artificial Sequence
  Synthetic
tcacctttcactcactcccc

SEQ ID NO: 3274 - DNA, 20 bp, Artificial Sequence
  Synthetic
tcacctttcactcactcccc

SEQ ID NO: 3275 - DNA, 20 bp, Artificial Sequence
  Synthetic
tcacctttcactcactcccc

SEQ ID NO: 3276 - DNA, 20 bp, Artificial Sequence
  Synthetic
tcacctttcactcactcccc

SEQ ID NO: 3277 - DNA, 20 bp, Artificial Sequence
  Synthetic
tcacctttcactcactcccc

SEQ ID NO: 3278 - DNA, 20 bp, Artificial Sequence
  Synthetic
tcacctttcactcactcccc

SEQ ID NO: 3279 - DNA, 20 bp, Artificial Sequence
  Synthetic
tcacctttcactcactcccc

SEQ ID NO: 3280 - DNA, 20 bp, Artificial Sequence
  Synthetic
tcacctttcactcactcccc

SEQ ID NO: 3281 - DNA, 20 bp, Artificial Sequence
  Synthetic
tcacctttcactcactcccc

SEQ ID NO: 3282 - DNA, 20 bp, Artificial Sequence
  Synthetic
tcacctttcactcactcccc

SEQ ID NO: 3283 - DNA, 20 bp, Artificial Sequence
  Synthetic
tcacctttcactcactcccc

SEQ ID NO: 3284 - DNA, 20 bp, Artificial Sequence
  Synthetic
gctcctttgttccgcataag

SEQ ID NO: 3285 - DNA, 20 bp, Artificial Sequence
  Synthetic
gctcctttgttccgcataag

SEQ ID NO: 3286 - DNA, 20 bp, Artificial Sequence
  Synthetic
gctcctttgttccgcataag

SEQ ID NO: 3287 - DNA, 20 bp, Artificial Sequence
  Synthetic
gctcctttgttccgcataag

SEQ ID NO: 3288 - DNA, 20 bp, Artificial Sequence
  Synthetic
gctcctttgttccgcataag

SEQ ID NO: 3289 - DNA, 20 bp, Artificial Sequence
  Synthetic
gctcctttgttccgcataag

SEQ ID NO: 3290 - DNA, 20 bp, Artificial Sequence
  Synthetic
gctcctttgttccgcataag

SEQ ID NO: 3291 - DNA, 20 bp, Artificial Sequence
  Synthetic
gctcctttgttccgcataag

SEQ ID NO: 3292 - DNA, 20 bp, Artificial Sequence
  Synthetic
gctcctttgttccgcataag

SEQ ID NO: 3293 - DNA, 20 bp, Artificial Sequence
  Synthetic
gctcctttgttccgcataag

SEQ ID NO: 3294 - DNA, 20 bp, Artificial Sequence
  Synthetic
gctcctttgttccgcataag

SEQ ID NO: 3295 - DNA, 20 bp, Artificial Sequence
  Synthetic
gctcctttgttccgcataag

SEQ ID NO: 3296 - DNA, 20 bp, Artificial Sequence
  Synthetic
gctcctttgttccgcataag

SEQ ID NO: 3297 - DNA, 20 bp, Artificial Sequence
  Synthetic
gctcctttgttccgcataag

SEQ ID NO: 3298 - DNA, 20 bp, Artificial Sequence
  Synthetic
gctcctttgttccgcataag

SEQ ID NO: 3299 - DNA, 20 bp, Artificial Sequence
  Synthetic
gctcctttgttccgcataag

SEQ ID NO: 3300 - DNA, 20 bp, Artificial Sequence
  Synthetic
gctcctttgttccgcataag

SEQ ID NO: 3301 - DNA, 20 bp, Artificial Sequence
  Synthetic
gctcctttgttccgcataag

SEQ ID NO: 3302 - DNA, 20 bp, Artificial Sequence
  Synthetic
gctcctttgttccgcataag

SEQ ID NO: 3303 - DNA, 20 bp, Artificial Sequence
  Synthetic
gctcctttgttccgcataag

SEQ ID NO: 3304 - DNA, 20 bp, Artificial Sequence
  Synthetic
gctcctttgttccgcataag

SEQ ID NO: 3305 - DNA, 20 bp, Artificial Sequence
  Synthetic
gctcctttgttccgcataag

SEQ ID NO: 3306 - DNA, 20 bp, Artificial Sequence
  Synthetic
gctcctttgttccgcataag

SEQ ID NO: 3307 - DNA, 20 bp, Artificial Sequence
  Synthetic
gctcctttgttccgcataag

SEQ ID NO: 3308 - DNA, 20 bp, Artificial Sequence
  Synthetic
gctcctttgttccgcataag

SEQ ID NO: 3309 - DNA, 20 bp, Artificial Sequence
  Synthetic
gctcctttgttccgcataag

SEQ ID NO: 3310 - DNA, 20 bp, Artificial Sequence
  Synthetic
gctcctttgttccgcataag

SEQ ID NO: 3311 - DNA, 20 bp, Artificial Sequence
  Synthetic
gctcctttgttccgcataag

SEQ ID NO: 3312 - DNA, 20 bp, Artificial Sequence
  Synthetic
gctcctttgttccgcataag

SEQ ID NO: 3313 - DNA, 20 bp, Artificial Sequence
  Synthetic
gctcctttgttccgcataag

SEQ ID NO: 3314 - DNA, 20 bp, Artificial Sequence
  Synthetic
gctcctttgttccgcataag

SEQ ID NO: 3315 - DNA, 20 bp, Artificial Sequence
  Synthetic
catgttcaccaaccagatgc

SEQ ID NO: 3316 - DNA, 20 bp, Artificial Sequence
  Synthetic
catgttcaccaaccagatgc

SEQ ID NO: 3317 - DNA, 20 bp, Artificial Sequence
  Synthetic
catgttcaccaaccagatgc

SEQ ID NO: 3318 - DNA, 20 bp, Artificial Sequence
  Synthetic
catgttcaccaaccagatgc

SEQ ID NO: 3319 - DNA, 20 bp, Artificial Sequence
  Synthetic
catgttcaccaaccagatgc

SEQ ID NO: 3320 - DNA, 20 bp, Artificial Sequence
  Synthetic
catgttcaccaaccagatgc

SEQ ID NO: 3321 - DNA, 20 bp, Artificial Sequence
  Synthetic
catgttcaccaaccagatgc

SEQ ID NO: 3322 - DNA, 20 bp, Artificial Sequence
  Synthetic
catgttcaccaaccagatgc

SEQ ID NO: 3323 - DNA, 20 bp, Artificial Sequence
  Synthetic
catgttcaccaaccagatgc

SEQ ID NO: 3324 - DNA, 20 bp, Artificial Sequence
  Synthetic
catgttcaccaaccagatgc

SEQ ID NO: 3325 - DNA, 20 bp, Artificial Sequence
  Synthetic
catgttcaccaaccagatgc

SEQ ID NO: 3326 - DNA, 20 bp, Artificial Sequence
  Synthetic
catgttcaccaaccagatgc

SEQ ID NO: 3327 - DNA, 20 bp, Artificial Sequence
  Synthetic
catgttcaccaaccagatgc

SEQ ID NO: 3328 - DNA, 20 bp, Artificial Sequence
  Synthetic
catgttcaccaaccagatgc

SEQ ID NO: 3329 - DNA, 20 bp, Artificial Sequence
  Synthetic
catgttcaccaaccagatgc

SEQ ID NO: 3330 - DNA, 20 bp, Artificial Sequence
  Synthetic
catgttcaccaaccagatgc

SEQ ID NO: 3331 - DNA, 20 bp, Artificial Sequence
  Synthetic
catgttcaccaaccagatgc

SEQ ID NO: 3332 - DNA, 20 bp, Artificial Sequence
  Synthetic
catgttcaccaaccagatgc

SEQ ID NO: 3333 - DNA, 20 bp, Artificial Sequence
  Synthetic
catgttcaccaaccagatgc

SEQ ID NO: 3334 - DNA, 20 bp, Artificial Sequence
  Synthetic
catgttcaccaaccagatgc

SEQ ID NO: 3335 - DNA, 20 bp, Artificial Sequence
  Synthetic
catgttcaccaaccagatgc

SEQ ID NO: 3336 - DNA, 20 bp, Artificial Sequence
  Synthetic
catgttcaccaaccagatgc

SEQ ID NO: 3337 - DNA, 20 bp, Artificial Sequence
  Synthetic
catgttcaccaaccagatgc

SEQ ID NO: 3338 - DNA, 20 bp, Artificial Sequence
  Synthetic
catgttcaccaaccagatgc

SEQ ID NO: 3339 - DNA, 20 bp, Artificial Sequence
  Synthetic
catgttcaccaaccagatgc

SEQ ID NO: 3340 - DNA, 20 bp, Artificial Sequence
  Synthetic
catgttcaccaaccagatgc

SEQ ID NO: 3341 - DNA, 20 bp, Artificial Sequence
  Synthetic
catgttcaccaaccagatgc

SEQ ID NO: 3342 - DNA, 20 bp, Artificial Sequence
  Synthetic
catgttcaccaaccagatgc

SEQ ID NO: 3343 - DNA, 20 bp, Artificial Sequence
  Synthetic
catgttcaccaaccagatgc

SEQ ID NO: 3344 - DNA, 20 bp, Artificial Sequence
  Synthetic
catgttcaccaaccagatgc

SEQ ID NO: 3345 - DNA, 20 bp, Artificial Sequence
  Synthetic
catgttcaccaaccagatgc

SEQ ID NO: 3346 - DNA, 20 bp, Artificial Sequence
  Synthetic
catgttcaccaaccagatgc

SEQ ID NO: 3347 - DNA, 20 bp, Artificial Sequence
  Synthetic
catgttcaccaaccagatgc

SEQ ID NO: 3348 - DNA, 20 bp, Artificial Sequence
  Synthetic
catgttcaccaaccagatgc

SEQ ID NO: 3349 - DNA, 20 bp, Artificial Sequence
  Synthetic
catgttcaccaaccagatgc

SEQ ID NO: 3350 - DNA, 20 bp, Artificial Sequence
  Synthetic
catgttcaccaaccagatgc

SEQ ID NO: 3351 - DNA, 20 bp, Artificial Sequence
  Synthetic
catgttcaccaaccagatgc

SEQ ID NO: 3352 - DNA, 20 bp, Artificial Sequence
  Synthetic
catgttcaccaaccagatgc

SEQ ID NO: 3353 - DNA, 20 bp, Artificial Sequence
  Synthetic
catgttcaccaaccagatgc

SEQ ID NO: 3354 - DNA, 20 bp, Artificial Sequence
  Synthetic
catgttcaccaaccagatgc

SEQ ID NO: 3355 - DNA, 20 bp, Artificial Sequence
  Synthetic
catgttcaccaaccagatgc

SEQ ID NO: 3356 - DNA, 20 bp, Artificial Sequence
  Synthetic
catgttcaccaaccagatgc

SEQ ID NO: 3357 - DNA, 20 bp, Artificial Sequence
  Synthetic
catgttcaccaaccagatgc

SEQ ID NO: 3358 - DNA, 20 bp, Artificial Sequence
  Synthetic
catgttcaccaaccagatgc

SEQ ID NO: 3359 - DNA, 20 bp, Artificial Sequence
  Synthetic
catgttcaccaaccagatgc

SEQ ID NO: 3360 - DNA, 20 bp, Artificial Sequence
  Synthetic
catgttcaccaaccagatgc

SEQ ID NO: 3361 - DNA, 20 bp, Artificial Sequence
  Synthetic
catgttcaccaaccagatgc

SEQ ID NO: 3362 - DNA, 20 bp, Artificial Sequence
  Synthetic
catgttcaccaaccagatgc

SEQ ID NO: 3363 - DNA, 20 bp, Artificial Sequence
  Synthetic
catgttcaccaaccagatgc

SEQ ID NO: 3364 - DNA, 20 bp, Artificial Sequence
  Synthetic
caggagcgctttgaaagaca

SEQ ID NO: 3365 - DNA, 20 bp, Artificial Sequence
  Synthetic
caggagcgctttgaaagaca

SEQ ID NO: 3366 - DNA, 20 bp, Artificial Sequence
  Synthetic
caggagcgctttgaaagaca

SEQ ID NO: 3367 - DNA, 20 bp, Artificial Sequence
  Synthetic
caggagcgctttgaaagaca

SEQ ID NO: 3368 - DNA, 20 bp, Artificial Sequence
  Synthetic
caggagcgctttgaaagaca

SEQ ID NO: 3369 - DNA, 20 bp, Artificial Sequence
  Synthetic
caggagcgctttgaaagaca

SEQ ID NO: 3370 - DNA, 20 bp, Artificial Sequence
  Synthetic
caggagcgctttgaaagaca

SEQ ID NO: 3371 - DNA, 20 bp, Artificial Sequence
  Synthetic
caggagcgctttgaaagaca

SEQ ID NO: 3372 - DNA, 20 bp, Artificial Sequence
  Synthetic
caggagcgctttgaaagaca

SEQ ID NO: 3373 - DNA, 20 bp, Artificial Sequence
  Synthetic
caggagcgctttgaaagaca

SEQ ID NO: 3374 - DNA, 20 bp, Artificial Sequence
  Synthetic
caggagcgctttgaaagaca

SEQ ID NO: 3375 - DNA, 20 bp, Artificial Sequence
  Synthetic
caggagcgctttgaaagaca

SEQ ID NO: 3376 - DNA, 20 bp, Artificial Sequence
  Synthetic
caggagcgctttgaaagaca

SEQ ID NO: 3377 - DNA, 20 bp, Artificial Sequence
  Synthetic
caggagcgctttgaaagaca

SEQ ID NO: 3378 - DNA, 20 bp, Artificial Sequence
  Synthetic
caggagcgctttgaaagaca

SEQ ID NO: 3379 - DNA, 20 bp, Artificial Sequence
  Synthetic
caggagcgctttgaaagaca

SEQ ID NO: 3380 - DNA, 20 bp, Artificial Sequence
  Synthetic
caggagcgctttgaaagaca

SEQ ID NO: 3381 - DNA, 20 bp, Artificial Sequence
  Synthetic
caggagcgctttgaaagaca

SEQ ID NO: 3382 - DNA, 20 bp, Artificial Sequence
  Synthetic
caggagcgctttgaaagaca

SEQ ID NO: 3383 - DNA, 20 bp, Artificial Sequence
  Synthetic
caggagcgctttgaaagaca

SEQ ID NO: 3384 - DNA, 20 bp, Artificial Sequence
  Synthetic
caggagcgctttgaaagaca

SEQ ID NO: 3385 - DNA, 20 bp, Artificial Sequence
  Synthetic
caggagcgctttgaaagaca

SEQ ID NO: 3386 - DNA, 20 bp, Artificial Sequence
  Synthetic
caggagcgctttgaaagaca

SEQ ID NO: 3387 - DNA, 20 bp, Artificial Sequence
  Synthetic
caggagcgctttgaaagaca

SEQ ID NO: 3388 - DNA, 20 bp, Artificial Sequence
  Synthetic
caggagcgctttgaaagaca

SEQ ID NO: 3389 - DNA, 20 bp, Artificial Sequence
  Synthetic
caggagcgctttgaaagaca

SEQ ID NO: 3390 - DNA, 20 bp, Artificial Sequence
  Synthetic
caggagcgctttgaaagaca

SEQ ID NO: 3391 - DNA, 20 bp, Artificial Sequence
  Synthetic
caggagcgctttgaaagaca

SEQ ID NO: 3392 - DNA, 20 bp, Artificial Sequence
  Synthetic
caggagcgctttgaaagaca

SEQ ID NO: 3393 - DNA, 20 bp, Artificial Sequence
  Synthetic
caggagcgctttgaaagaca

SEQ ID NO: 3394 - DNA, 20 bp, Artificial Sequence
  Synthetic
caggagcgctttgaaagaca

SEQ ID NO: 3395 - DNA, 20 bp, Artificial Sequence
  Synthetic
cccagtcagccacaaaatca

SEQ ID NO: 3396 - DNA, 20 bp, Artificial Sequence
  Synthetic
cccagtcagccacaaaatca

SEQ ID NO: 3397 - DNA, 20 bp, Artificial Sequence
  Synthetic
cccagtcagccacaaaatca

SEQ ID NO: 3398 - DNA, 20 bp, Artificial Sequence
  Synthetic
cccagtcagccacaaaatca

SEQ ID NO: 3399 - DNA, 20 bp, Artificial Sequence
  Synthetic
cccagtcagccacaaaatca

SEQ ID NO: 3400 - DNA, 20 bp, Artificial Sequence
  Synthetic
cccagtcagccacaaaatca

SEQ ID NO: 3401 - DNA, 20 bp, Artificial Sequence
  Synthetic
cccagtcagccacaaaatca

SEQ ID NO: 3402 - DNA, 20 bp, Artificial Sequence
  Synthetic
cccagtcagccacaaaatca

SEQ ID NO: 3403 - DNA, 20 bp, Artificial Sequence
  Synthetic
cccagtcagccacaaaatca

SEQ ID NO: 3404 - DNA, 20 bp, Artificial Sequence
  Synthetic
cccagtcagccacaaaatca

SEQ ID NO: 3405 - DNA, 20 bp, Artificial Sequence
  Synthetic
cccagtcagccacaaaatca

SEQ ID NO: 3406 - DNA, 20 bp, Artificial Sequence
  Synthetic
cccagtcagccacaaaatca

SEQ ID NO: 3407 - DNA, 20 bp, Artificial Sequence
  Synthetic
cccagtcagccacaaaatca

SEQ ID NO: 3408 - DNA, 20 bp, Artificial Sequence
  Synthetic
cccagtcagccacaaaatca

SEQ ID NO: 3409 - DNA, 20 bp, Artificial Sequence
  Synthetic
cccagtcagccacaaaatca

SEQ ID NO: 3410 - DNA, 20 bp, Artificial Sequence
  Synthetic
caggatcttggctcactgca

SEQ ID NO: 3411 - DNA, 20 bp, Artificial Sequence
  Synthetic
caggatcttggctcactgca

SEQ ID NO: 3412 - DNA, 20 bp, Artificial Sequence
  Synthetic
caggatcttggctcactgca

SEQ ID NO: 3413 - DNA, 20 bp, Artificial Sequence
  Synthetic
caggatcttggctcactgca

SEQ ID NO: 3414 - DNA, 20 bp, Artificial Sequence
  Synthetic
ggaggaggctgatttgtgct

SEQ ID NO: 3415 - DNA, 20 bp, Artificial Sequence
  Synthetic
ggaggaggctgatttgtgct

SEQ ID NO: 3416 - DNA, 20 bp, Artificial Sequence
  Synthetic
ggcttagaggatggtgctcc

SEQ ID NO: 3417 - DNA, 20 bp, Artificial Sequence
  Synthetic
ggtgctggcagtgacaaatg

SEQ ID NO: 3418 - DNA, 20 bp, Artificial Sequence
  Synthetic
ggtgctggcagtgacaaatg

SEQ ID NO: 3419 - DNA, 20 bp, Artificial Sequence
  Synthetic
ggtgctggcagtgacaaatg

SEQ ID NO: 3420 - DNA, 20 bp, Artificial Sequence
  Synthetic
ggtgctggcagtgacaaatg

SEQ ID NO: 3421 - DNA, 20 bp, Artificial Sequence
  Synthetic
aagcgaggcaaaaagctgtg

SEQ ID NO: 3422 - DNA, 20 bp, Artificial Sequence
  Synthetic
ttgcttttgaccacgtgcag

SEQ ID NO: 3423 - DNA, 20 bp, Artificial Sequence
  Synthetic
cacagctttttgcctcgctt

SEQ ID NO: 3424 - DNA, 20 bp, Artificial Sequence
  Synthetic
cacagctttttgcctcgctt

SEQ ID NO: 3425 - DNA, 20 bp, Artificial Sequence
  Synthetic
caaaacatagccgggcacag

SEQ ID NO: 3426 - DNA, 20 bp, Artificial Sequence
  Synthetic
cacagctttttgcctcgctt

SEQ ID NO: 3427 - DNA, 20 bp, Artificial Sequence
  Synthetic
cacagctttttgcctcgctt

SEQ ID NO: 3428 - DNA, 20 bp, Artificial Sequence
  Synthetic
cacagctttttgcctcgctt

SEQ ID NO: 3429 - DNA, 20 bp, Artificial Sequence
  Synthetic
gcacagtacacaggactgct

SEQ ID NO: 3430 - DNA, 20 bp, Artificial Sequence
  Synthetic
ctgtgcccggctatgttttg

SEQ ID NO: 3431 - DNA, 20 bp, Artificial Sequence
  Synthetic
gtaggaaacttgggagggcc

SEQ ID NO: 3432 - DNA, 20 bp, Artificial Sequence
  Synthetic
cattcttcggacaccagcct

SEQ ID NO: 3433 - DNA, 20 bp, Artificial Sequence
  Synthetic
agcagtcctgtgtactgtgc

SEQ ID NO: 3434 - DNA, 20 bp, Artificial Sequence
  Synthetic
agcagtcctgtgtactgtgc

SEQ ID NO: 3435 - DNA, 20 bp, Artificial Sequence
  Synthetic
agcagtcctgtgtactgtgc

SEQ ID NO: 3436 - DNA, 20 bp, Artificial Sequence
  Synthetic
agcagtcctgtgtactgtgc

SEQ ID NO: 3437 - DNA, 20 bp, Artificial Sequence
  Synthetic
agcagtcctgtgtactgtgc

SEQ ID NO: 3438 - DNA, 20 bp, Artificial Sequence
  Synthetic
agcagtcctgtgtactgtgc

SEQ ID NO: 3439 - DNA, 20 bp, Artificial Sequence
  Synthetic
ggaggctgaggcaggaaaat

SEQ ID NO: 3440 - DNA, 20 bp, Artificial Sequence
  Synthetic
ggtggattgcctgaggtcaa

SEQ ID NO: 3441 - DNA, 20 bp, Artificial Sequence
  Synthetic
ggtggattgcctgaggtcaa

SEQ ID NO: 3442 - DNA, 20 bp, Artificial Sequence
  Synthetic
ggtggattgcctgaggtcaa

SEQ ID NO: 3443 - DNA, 20 bp, Artificial Sequence
  Synthetic
ggtggattgcctgaggtcaa

SEQ ID NO: 3444 - DNA, 20 bp, Artificial Sequence
  Synthetic
ggtggattgcctgaggtcaa

SEQ ID NO: 3445 - DNA, 20 bp, Artificial Sequence
  Synthetic
ggtggattgcctgaggtcaa

SEQ ID NO: 3446 - DNA, 20 bp, Artificial Sequence
  Synthetic
tttctctggctgggcttagc

SEQ ID NO: 3447 - DNA, 20 bp, Artificial Sequence
  Synthetic
ggccctcccaagtttcctac

SEQ ID NO: 3448 - DNA, 20 bp, Artificial Sequence
  Synthetic
tggaagctccattcaggcag

SEQ ID NO: 3449 - DNA, 20 bp, Artificial Sequence
  Synthetic
tggaagctccattcaggcag

SEQ ID NO: 3450 - DNA, 20 bp, Artificial Sequence
  Synthetic
ccctgaccctttgctccttt

SEQ ID NO: 3451 - DNA, 20 bp, Artificial Sequence
  Synthetic
ccctgaccctttgctccttt

SEQ ID NO: 3452 - DNA, 20 bp, Artificial Sequence
  Synthetic
ccctgaccctttgctccttt

SEQ ID NO: 3453 - DNA, 20 bp, Artificial Sequence
  Synthetic
ctttcactcactcccccacc

SEQ ID NO: 3454 - DNA, 20 bp, Artificial Sequence
  Synthetic
attttcctgcctcagcctcc

SEQ ID NO: 3455 - DNA, 20 bp, Artificial Sequence
  Synthetic
ctttcactcactcccccacc

SEQ ID NO: 3456 - DNA, 20 bp, Artificial Sequence
  Synthetic
ctttcactcactcccccacc

SEQ ID NO: 3457 - DNA, 20 bp, Artificial Sequence
  Synthetic
ggctgtggagttgaacccat

SEQ ID NO: 3458 - DNA, 20 bp, Artificial Sequence
  Synthetic
ggctgtggagttgaacccat

SEQ ID NO: 3459 - DNA, 20 bp, Artificial Sequence
  Synthetic
ggctgtggagttgaacccat

SEQ ID NO: 3460 - DNA, 20 bp, Artificial Sequence
  Synthetic
ggctgtggagttgaacccat

SEQ ID NO: 3461 - DNA, 20 bp, Artificial Sequence
  Synthetic
ggctgtggagttgaacccat

SEQ ID NO: 3462 - DNA, 20 bp, Artificial Sequence
  Synthetic
ggctgtggagttgaacccat

SEQ ID NO: 3463 - DNA, 20 bp, Artificial Sequence
  Synthetic
ggctgtggagttgaacccat

SEQ ID NO: 3464 - DNA, 20 bp, Artificial Sequence
  Synthetic
ggctgtggagttgaacccat

SEQ ID NO: 3465 - DNA, 20 bp, Artificial Sequence
  Synthetic
ggctgtggagttgaacccat

SEQ ID NO: 3466 - DNA, 20 bp, Artificial Sequence
  Synthetic
gtgcaatcaagcagaagccc

SEQ ID NO: 3467 - DNA, 20 bp, Artificial Sequence
  Synthetic
gtgcaatcaagcagaagccc

SEQ ID NO: 3468 - DNA, 20 bp, Artificial Sequence
  Synthetic
gtgcaatcaagcagaagccc

SEQ ID NO: 3469 - DNA, 20 bp, Artificial Sequence
  Synthetic
ttgggcggatcaattgagct

SEQ ID NO: 3470 - DNA, 20 bp, Artificial Sequence
  Synthetic
ggctgtggagttgaacccat

SEQ ID NO: 3471 - DNA, 20 bp, Artificial Sequence
  Synthetic
cagcaggttagggtgggaag

SEQ ID NO: 3472 - DNA, 20 bp, Artificial Sequence
  Synthetic
agctcaattgatccgcccaa

SEQ ID NO: 3473 - DNA, 20 bp, Artificial Sequence
  Synthetic
agctcaattgatccgcccaa

SEQ ID NO: 3474 - DNA, 20 bp, Artificial Sequence
  Synthetic
agctcaattgatccgcccaa

SEQ ID NO: 3475 - DNA, 20 bp, Artificial Sequence
  Synthetic
agctcaattgatccgcccaa

SEQ ID NO: 3476 - DNA, 20 bp, Artificial Sequence
  Synthetic
agctcaattgatccgcccaa

SEQ ID NO: 3477 - DNA, 20 bp, Artificial Sequence
  Synthetic
agctcaattgatccgcccaa

SEQ ID NO: 3478 - DNA, 20 bp, Artificial Sequence
  Synthetic
agctcaattgatccgcccaa

SEQ ID NO: 3479 - DNA, 20 bp, Artificial Sequence
  Synthetic
aaagaacacctggaggagcg

SEQ ID NO: 3480 - DNA, 20 bp, Artificial Sequence
  Synthetic
aaagaacacctggaggagcg

SEQ ID NO: 3481 - DNA, 20 bp, Artificial Sequence
  Synthetic
aaagaacacctggaggagcg

SEQ ID NO: 3482 - DNA, 20 bp, Artificial Sequence
  Synthetic
aaagaacacctggaggagcg

SEQ ID NO: 3483 - DNA, 20 bp, Artificial Sequence
  Synthetic
aaagaacacctggaggagcg

SEQ ID NO: 3484 - DNA, 20 bp, Artificial Sequence
  Synthetic
aaagaacacctggaggagcg

SEQ ID NO: 3485 - DNA, 20 bp, Artificial Sequence
  Synthetic
aaagaacacctggaggagcg

SEQ ID NO: 3486 - DNA, 20 bp, Artificial Sequence
  Synthetic
acagagtgggcaacttcagg

SEQ ID NO: 3487 - DNA, 20 bp, Artificial Sequence
  Synthetic
ccctcgggtactcagactca

SEQ ID NO: 3488 - DNA, 20 bp, Artificial Sequence
  Synthetic
ccctcgggtactcagactca

SEQ ID NO: 3489 - DNA, 20 bp, Artificial Sequence
  Synthetic
ccctcgggtactcagactca

SEQ ID NO: 3490 - DNA, 20 bp, Artificial Sequence
  Synthetic
ccctcgggtactcagactca

SEQ ID NO: 3491 - DNA, 20 bp, Artificial Sequence
  Synthetic
ccctcgggtactcagactca

SEQ ID NO: 3492 - DNA, 20 bp, Artificial Sequence
  Synthetic
ccctcgggtactcagactca

SEQ ID NO: 3493 - DNA, 20 bp, Artificial Sequence
  Synthetic
cctggcgacaaaacccctat

SEQ ID NO: 3494 - DNA, 20 bp, Artificial Sequence
  Synthetic
cagctgctgtttcctcagga

SEQ ID NO: 3495 - DNA, 20 bp, Artificial Sequence
  Synthetic
cagctgctgtttcctcagga

SEQ ID NO: 3496 - DNA, 20 bp, Artificial Sequence
  Synthetic
cagctgctgtttcctcagga

SEQ ID NO: 3497 - DNA, 20 bp, Artificial Sequence
  Synthetic
cgacctgtgtgaatccagct

SEQ ID NO: 3498 - DNA, 20 bp, Artificial Sequence
  Synthetic
cgacctgtgtgaatccagct

SEQ ID NO: 3499 - DNA, 20 bp, Artificial Sequence
  Synthetic
tacctccctccacttctggg

SEQ ID NO: 3500 - DNA, 20 bp, Artificial Sequence
  Synthetic
tacctccctccacttctggg

SEQ ID NO: 3501 - DNA, 20 bp, Artificial Sequence
  Synthetic
tacctccctccacttctggg

SEQ ID NO: 3502 - DNA, 20 bp, Artificial Sequence
  Synthetic
cgctcctccaggtgttcttt

SEQ ID NO: 3503 - DNA, 20 bp, Artificial Sequence
  Synthetic
cgctcctccaggtgttcttt

SEQ ID NO: 3504 - DNA, 20 bp, Artificial Sequence
  Synthetic
ccaggtcctccatcttctgc

SEQ ID NO: 3505 - DNA, 20 bp, Artificial Sequence
  Synthetic
tagggaatctgaggggtggg

SEQ ID NO: 3506 - DNA, 20 bp, Artificial Sequence
  Synthetic
tagggaatctgaggggtggg

SEQ ID NO: 3507 - DNA, 20 bp, Artificial Sequence
  Synthetic
tagggaatctgaggggtggg

SEQ ID NO: 3508 - DNA, 20 bp, Artificial Sequence
  Synthetic
tagggaatctgaggggtggg

SEQ ID NO: 3509 - DNA, 20 bp, Artificial Sequence
  Synthetic
tagggaatctgaggggtggg

SEQ ID NO: 3510 - DNA, 20 bp, Artificial Sequence
  Synthetic
tagggaatctgaggggtggg

SEQ ID NO: 3511 - DNA, 20 bp, Artificial Sequence
  Synthetic
tagggaatctgaggggtggg

SEQ ID NO: 3512 - DNA, 20 bp, Artificial Sequence
  Synthetic
tagggaatctgaggggtggg

SEQ ID NO: 3513 - DNA, 20 bp, Artificial Sequence
  Synthetic
tagggaatctgaggggtggg

SEQ ID NO: 3514 - DNA, 20 bp, Artificial Sequence
  Synthetic
tagggaatctgaggggtggg

SEQ ID NO: 3515 - DNA, 20 bp, Artificial Sequence
  Synthetic
tgaagacctgcagcttcctg

SEQ ID NO: 3516 - DNA, 20 bp, Artificial Sequence
  Synthetic
tgaagacctgcagcttcctg

SEQ ID NO: 3517 - DNA, 20 bp, Artificial Sequence
  Synthetic
ctgaggaaacagcagctgga

SEQ ID NO: 3518 - DNA, 20 bp, Artificial Sequence
  Synthetic
ctgaggaaacagcagctgga

SEQ ID NO: 3519 - DNA, 20 bp, Artificial Sequence
  Synthetic
ctgaggaaacagcagctgga

SEQ ID NO: 3520 - DNA, 20 bp, Artificial Sequence
  Synthetic
cgagagaccatgagcccatc

SEQ ID NO: 3521 - DNA, 20 bp, Artificial Sequence
  Synthetic
cgagagaccatgagcccatc

SEQ ID NO: 3522 - DNA, 20 bp, Artificial Sequence
  Synthetic
cgagagaccatgagcccatc

SEQ ID NO: 3523 - DNA, 20 bp, Artificial Sequence
  Synthetic
gcaacccattagcccagact

SEQ ID NO: 3524 - DNA, 20 bp, Artificial Sequence
  Synthetic
gcaacccattagcccagact

SEQ ID NO: 3525 - DNA, 20 bp, Artificial Sequence
  Synthetic
caggaagctgcaggtcttca

SEQ ID NO: 3526 - DNA, 20 bp, Artificial Sequence
  Synthetic
caggaagctgcaggtcttca

SEQ ID NO: 3527 - DNA, 20 bp, Artificial Sequence
  Synthetic
caggaagctgcaggtcttca

SEQ ID NO: 3528 - DNA, 20 bp, Artificial Sequence
  Synthetic
caggaagctgcaggtcttca

SEQ ID NO: 3529 - DNA, 20 bp, Artificial Sequence
  Synthetic
caggaagctgcaggtcttca

SEQ ID NO: 3530 - DNA, 20 bp, Artificial Sequence
  Synthetic
gactgagcctgggatttgct

SEQ ID NO: 3531 - DNA, 20 bp, Artificial Sequence
  Synthetic
gactgagcctgggatttgct

SEQ ID NO: 3532 - DNA, 20 bp, Artificial Sequence
  Synthetic
gactgagcctgggatttgct

SEQ ID NO: 3533 - DNA, 20 bp, Artificial Sequence
  Synthetic
gatgggctcatggtctctcg

SEQ ID NO: 3534 - DNA, 20 bp, Artificial Sequence
  Synthetic
gatgggctcatggtctctcg

SEQ ID NO: 3535 - DNA, 20 bp, Artificial Sequence
  Synthetic
gatgggctcatggtctctcg

SEQ ID NO: 3536 - DNA, 20 bp, Artificial Sequence
  Synthetic
caaggtgctgagagccaaga

SEQ ID NO: 3537 - DNA, 20 bp, Artificial Sequence
  Synthetic
ggtctcgaggttgtcactgg

SEQ ID NO: 3538 - DNA, 20 bp, Artificial Sequence
  Synthetic
ggtctcgaggttgtcactgg

SEQ ID NO: 3539 - DNA, 20 bp, Artificial Sequence
  Synthetic
ggtctcgaggttgtcactgg

SEQ ID NO: 3540 - DNA, 20 bp, Artificial Sequence
  Synthetic
ggtctcgaggttgtcactgg

SEQ ID NO: 3541 - DNA, 20 bp, Artificial Sequence
  Synthetic
ggtctcgaggttgtcactgg

SEQ ID NO: 3542 - DNA, 20 bp, Artificial Sequence
  Synthetic
agtctgggctaatgggttgc

SEQ ID NO: 3543 - DNA, 20 bp, Artificial Sequence
  Synthetic
agtctgggctaatgggttgc

SEQ ID NO: 3544 - DNA, 20 bp, Artificial Sequence
  Synthetic
agtctgggctaatgggttgc

SEQ ID NO: 3545 - DNA, 20 bp, Artificial Sequence
  Synthetic
agtctgggctaatgggttgc

SEQ ID NO: 3546 - DNA, 20 bp, Artificial Sequence
  Synthetic
catgtggatgtctgggctgt

SEQ ID NO: 3547 - DNA, 20 bp, Artificial Sequence
  Synthetic
catgtggatgtctgggctgt

SEQ ID NO: 3548 - DNA, 20 bp, Artificial Sequence
  Synthetic
catgtggatgtctgggctgt

SEQ ID NO: 3549 - DNA, 20 bp, Artificial Sequence
  Synthetic
catgtggatgtctgggctgt

SEQ ID NO: 3550 - DNA, 20 bp, Artificial Sequence
  Synthetic
catgtggatgtctgggctgt

SEQ ID NO: 3551 - DNA, 20 bp, Artificial Sequence
  Synthetic
catgtggatgtctgggctgt

SEQ ID NO: 3552 - DNA, 20 bp, Artificial Sequence
  Synthetic
catgtggatgtctgggctgt

SEQ ID NO: 3553 - DNA, 20 bp, Artificial Sequence
  Synthetic
agcagctggtccatttaccc

SEQ ID NO: 3554 - DNA, 20 bp, Artificial Sequence
  Synthetic
gaggtgagcagagcttcctg

SEQ ID NO: 3555 - DNA, 20 bp, Artificial Sequence
  Synthetic
ttagttgggcttggtgggac

SEQ ID NO: 3556 - DNA, 20 bp, Artificial Sequence
  Synthetic
ttagttgggcttggtgggac

SEQ ID NO: 3557 - DNA, 20 bp, Artificial Sequence
  Synthetic
ttagttgggcttggtgggac

SEQ ID NO: 3558 - DNA, 20 bp, Artificial Sequence
  Synthetic
gatgcccacagaactggtga

SEQ ID NO: 3559 - DNA, 20 bp, Artificial Sequence
  Synthetic
gatgcccacagaactggtga

SEQ ID NO: 3560 - DNA, 20 bp, Artificial Sequence
  Synthetic
gatgcccacagaactggtga

SEQ ID NO: 3561 - DNA, 20 bp, Artificial Sequence
  Synthetic
gatgcccacagaactggtga

SEQ ID NO: 3562 - DNA, 20 bp, Artificial Sequence
  Synthetic
agtgagctgaacctcatggc

SEQ ID NO: 3563 - DNA, 20 bp, Artificial Sequence
  Synthetic
gttcgagaccagcctcaaca

SEQ ID NO: 3564 - DNA, 20 bp, Artificial Sequence
  Synthetic
gttcgagaccagcctcaaca

SEQ ID NO: 3565 - DNA, 20 bp, Artificial Sequence
  Synthetic
gttcgagaccagcctcaaca

SEQ ID NO: 3566 - DNA, 20 bp, Artificial Sequence
  Synthetic
gttcgagaccagcctcaaca

SEQ ID NO: 3567 - DNA, 20 bp, Artificial Sequence
  Synthetic
ggagtctgaggtgggaggat

SEQ ID NO: 3568 - DNA, 20 bp, Artificial Sequence
  Synthetic
ggagtctgaggtgggaggat

SEQ ID NO: 3569 - DNA, 20 bp, Artificial Sequence
  Synthetic
ggagtctgaggtgggaggat

SEQ ID NO: 3570 - DNA, 20 bp, Artificial Sequence
  Synthetic
ggagtctgaggtgggaggat

SEQ ID NO: 3571 - DNA, 20 bp, Artificial Sequence
  Synthetic
tgcgcctggctaatttgttg

SEQ ID NO: 3572 - DNA, 20 bp, Artificial Sequence
  Synthetic
tccctgtctttcaaagcgct

SEQ ID NO: 3573 - DNA, 20 bp, Artificial Sequence
  Synthetic
attgttccgtgggtggagtc

SEQ ID NO: 3574 - DNA, 20 bp, Artificial Sequence
  Synthetic
attgttccgtgggtggagtc

SEQ ID NO: 3575 - DNA, 20 bp, Artificial Sequence
  Synthetic
cagtgccagcaagactagct

SEQ ID NO: 3576 - DNA, 20 bp, Artificial Sequence
  Synthetic
ggttgcagtgagctgagact

SEQ ID NO: 3577 - DNA, 20 bp, Artificial Sequence
  Synthetic
tgcctggtacacagcaaaca

SEQ ID NO: 3578 - DNA, 20 bp, Artificial Sequence
  Synthetic
tgcctggtacacagcaaaca

SEQ ID NO: 3579 - DNA, 20 bp, Artificial Sequence
  Synthetic
tgcctggtacacagcaaaca

SEQ ID NO: 3580 - DNA, 20 bp, Artificial Sequence
  Synthetic
tgcctggtacacagcaaaca

SEQ ID NO: 3581 - DNA, 20 bp, Artificial Sequence
  Synthetic
tgcctggtacacagcaaaca

SEQ ID NO: 3582 - DNA, 20 bp, Artificial Sequence
  Synthetic
ggaggaggctgatttgtgct

SEQ ID NO: 3583 - DNA, 20 bp, Artificial Sequence
  Synthetic
ggaggaggctgatttgtgct

SEQ ID NO: 3584 - DNA, 20 bp, Artificial Sequence
  Synthetic
ggaggaggctgatttgtgct

SEQ ID NO: 3585 - DNA, 20 bp, Artificial Sequence
  Synthetic
ggaggaggctgatttgtgct

SEQ ID NO: 3586 - DNA, 20 bp, Artificial Sequence
  Synthetic
caggatcttggctcactgca

SEQ ID NO: 3587 - DNA, 20 bp, Artificial Sequence
  Synthetic
caggatcttggctcactgca

SEQ ID NO: 3588 - DNA, 20 bp, Artificial Sequence
  Synthetic
ggaggaggctgatttgtgct

SEQ ID NO: 3589 - DNA, 20 bp, Artificial Sequence
  Synthetic
aaagaagctgtggcagtgga

SEQ ID NO: 3590 - DNA, 20 bp, Artificial Sequence
  Synthetic
aaagaagctgtggcagtgga

SEQ ID NO: 3591 - DNA, 20 bp, Artificial Sequence
  Synthetic
aagcgaggcaaaaagctgtg

SEQ ID NO: 3592 - DNA, 20 bp, Artificial Sequence
  Synthetic
aagcgaggcaaaaagctgtg

SEQ ID NO: 3593 - DNA, 20 bp, Artificial Sequence
  Synthetic
ggtgctggcagtgacaaatg

SEQ ID NO: 3594 - DNA, 20 bp, Artificial Sequence
  Synthetic
gcacaaatcagcctcctcct

SEQ ID NO: 3595 - DNA, 20 bp, Artificial Sequence
  Synthetic
caaaacatagccgggcacag

SEQ ID NO: 3596 - DNA, 20 bp, Artificial Sequence
  Synthetic
caaaacatagccgggcacag

SEQ ID NO: 3597 - DNA, 20 bp, Artificial Sequence
  Synthetic
cacagctttttgcctcgctt

SEQ ID NO: 3598 - DNA, 20 bp, Artificial Sequence
  Synthetic
cagcctggccaacatagtga

SEQ ID NO: 3599 - DNA, 20 bp, Artificial Sequence
  Synthetic
cagcctggccaacatagtga

SEQ ID NO: 3600 - DNA, 20 bp, Artificial Sequence
  Synthetic
atctcagcactttgggaggc

SEQ ID NO: 3601 - DNA, 20 bp, Artificial Sequence
  Synthetic
tgcacgtggtcaaaagcaag

SEQ ID NO: 3602 - DNA, 20 bp, Artificial Sequence
  Synthetic
gtaggaaacttgggagggcc

SEQ ID NO: 3603 - DNA, 20 bp, Artificial Sequence
  Synthetic
ctgtgcccggctatgttttg

SEQ ID NO: 3604 - DNA, 20 bp, Artificial Sequence
  Synthetic
tgggtgctgagcatacacag

SEQ ID NO: 3605 - DNA, 20 bp, Artificial Sequence
  Synthetic
aaaggagcaaagggtcaggg

SEQ ID NO: 3606 - DNA, 20 bp, Artificial Sequence
  Synthetic
aaaggagcaaagggtcaggg

SEQ ID NO: 3607 - DNA, 20 bp, Artificial Sequence
  Synthetic
aaaggagcaaagggtcaggg

SEQ ID NO: 3608 - DNA, 20 bp, Artificial Sequence
  Synthetic
aaaggagcaaagggtcaggg

SEQ ID NO: 3609 - DNA, 20 bp, Artificial Sequence
  Synthetic
aaaggagcaaagggtcaggg

SEQ ID NO: 3610 - DNA, 20 bp, Artificial Sequence
  Synthetic
ggaggctgaggcaggaaaat

SEQ ID NO: 3611 - DNA, 20 bp, Artificial Sequence
  Synthetic
agcagtcctgtgtactgtgc

SEQ ID NO: 3612 - DNA, 20 bp, Artificial Sequence
  Synthetic
agcagtcctgtgtactgtgc

SEQ ID NO: 3613 - DNA, 20 bp, Artificial Sequence
  Synthetic
agcagtcctgtgtactgtgc

SEQ ID NO: 3614 - DNA, 20 bp, Artificial Sequence
  Synthetic
agcagtcctgtgtactgtgc

SEQ ID NO: 3615 - DNA, 20 bp, Artificial Sequence
  Synthetic
agcagtcctgtgtactgtgc

SEQ ID NO: 3616 - DNA, 20 bp, Artificial Sequence
  Synthetic
agcagtcctgtgtactgtgc

SEQ ID NO: 3617 - DNA, 20 bp, Artificial Sequence
  Synthetic
agcagtcctgtgtactgtgc

SEQ ID NO: 3618 - DNA, 20 bp, Artificial Sequence
  Synthetic
atgggttcaactccacagcc

SEQ ID NO: 3619 - DNA, 20 bp, Artificial Sequence
  Synthetic
atgggttcaactccacagcc

SEQ ID NO: 3620 - DNA, 20 bp, Artificial Sequence
  Synthetic
tgtgtatgctcagcacccag

SEQ ID NO: 3621 - DNA, 20 bp, Artificial Sequence
  Synthetic
tgtgtatgctcagcacccag

SEQ ID NO: 3622 - DNA, 20 bp, Artificial Sequence
  Synthetic
ctttcactcactcccccacc

SEQ ID NO: 3623 - DNA, 20 bp, Artificial Sequence
  Synthetic
ctttcactcactcccccacc

SEQ ID NO: 3624 - DNA, 20 bp, Artificial Sequence
  Synthetic
ctttcactcactcccccacc

SEQ ID NO: 3625 - DNA, 20 bp, Artificial Sequence
  Synthetic
ccctgaccctttgctccttt

SEQ ID NO: 3626 - DNA, 20 bp, Artificial Sequence
  Synthetic
ctttcactcactcccccacc

SEQ ID NO: 3627 - DNA, 20 bp, Artificial Sequence
  Synthetic
attttcctgcctcagcctcc

SEQ ID NO: 3628 - DNA, 20 bp, Artificial Sequence
  Synthetic
attttcctgcctcagcctcc

SEQ ID NO: 3629 - DNA, 20 bp, Artificial Sequence
  Synthetic
ctttcactcactcccccacc

SEQ ID NO: 3630 - DNA, 20 bp, Artificial Sequence
  Synthetic
cctttcactcactcccccac

SEQ ID NO: 3631 - DNA, 20 bp, Artificial Sequence
  Synthetic
cctttcactcactcccccac

SEQ ID NO: 3632 - DNA, 20 bp, Artificial Sequence
  Synthetic
gcgttgctgctagctctttc

SEQ ID NO: 3633 - DNA, 20 bp, Artificial Sequence
  Synthetic
ttgggcggatcaattgagct

SEQ ID NO: 3634 - DNA, 20 bp, Artificial Sequence
  Synthetic
ttgggcggatcaattgagct

SEQ ID NO: 3635 - DNA, 20 bp, Artificial Sequence
  Synthetic
ttgggcggatcaattgagct

SEQ ID NO: 3636 - DNA, 20 bp, Artificial Sequence
  Synthetic
ttgggcggatcaattgagct

SEQ ID NO: 3637 - DNA, 20 bp, Artificial Sequence
  Synthetic
ttgggcggatcaattgagct

SEQ ID NO: 3638 - DNA, 20 bp, Artificial Sequence
  Synthetic
ttgggcggatcaattgagct

SEQ ID NO: 3639 - DNA, 20 bp, Artificial Sequence
  Synthetic
ttgggcggatcaattgagct

SEQ ID NO: 3640 - DNA, 20 bp, Artificial Sequence
  Synthetic
ttgggcggatcaattgagct

SEQ ID NO: 3641 - DNA, 20 bp, Artificial Sequence
  Synthetic
gtgcaatcaagcagaagccc

SEQ ID NO: 3642 - DNA, 20 bp, Artificial Sequence
  Synthetic
gggggagtgagtgaaaggtg

SEQ ID NO: 3643 - DNA, 20 bp, Artificial Sequence
  Synthetic
gggggagtgagtgaaaggtg

SEQ ID NO: 3644 - DNA, 20 bp, Artificial Sequence
  Synthetic
cagcaggttagggtgggaag

SEQ ID NO: 3645 - DNA, 20 bp, Artificial Sequence
  Synthetic
cagcaggttagggtgggaag

SEQ ID NO: 3646 - DNA, 20 bp, Artificial Sequence
  Synthetic
ttgactccaaagcaaggcca

SEQ ID NO: 3647 - DNA, 20 bp, Artificial Sequence
  Synthetic
ttgactccaaagcaaggcca

SEQ ID NO: 3648 - DNA, 20 bp, Artificial Sequence
  Synthetic
ttgactccaaagcaaggcca

SEQ ID NO: 3649 - DNA, 20 bp, Artificial Sequence
  Synthetic
aaagaacacctggaggagcg

SEQ ID NO: 3650 - DNA, 20 bp, Artificial Sequence
  Synthetic
aaagaacacctggaggagcg

SEQ ID NO: 3651 - DNA, 20 bp, Artificial Sequence
  Synthetic
agctcaattgatccgcccaa

SEQ ID NO: 3652 - DNA, 20 bp, Artificial Sequence
  Synthetic
agctcaattgatccgcccaa

SEQ ID NO: 3653 - DNA, 20 bp, Artificial Sequence
  Synthetic
agctcaattgatccgcccaa

SEQ ID NO: 3654 - DNA, 20 bp, Artificial Sequence
  Synthetic
agctcaattgatccgcccaa

SEQ ID NO: 3655 - DNA, 20 bp, Artificial Sequence
  Synthetic
agctcaattgatccgcccaa

SEQ ID NO: 3656 - DNA, 20 bp, Artificial Sequence
  Synthetic
agctcaattgatccgcccaa

SEQ ID NO: 3657 - DNA, 20 bp, Artificial Sequence
  Synthetic
agctcaattgatccgcccaa

SEQ ID NO: 3658 - DNA, 20 bp, Artificial Sequence
  Synthetic
cccacccctcagattcccta

SEQ ID NO: 3659 - DNA, 20 bp, Artificial Sequence
  Synthetic
cccacccctcagattcccta

SEQ ID NO: 3660 - DNA, 20 bp, Artificial Sequence
  Synthetic
cccacccctcagattcccta

SEQ ID NO: 3661 - DNA, 20 bp, Artificial Sequence
  Synthetic
cccacccctcagattcccta

SEQ ID NO: 3662 - DNA, 20 bp, Artificial Sequence
  Synthetic
actcccacccatcctacctc

SEQ ID NO: 3663 - DNA, 20 bp, Artificial Sequence
  Synthetic
actcccacccatcctacctc

SEQ ID NO: 3664 - DNA, 20 bp, Artificial Sequence
  Synthetic
cctggcgacaaaacccctat

SEQ ID NO: 3665 - DNA, 20 bp, Artificial Sequence
  Synthetic
ccctcgggtactcagactca

SEQ ID NO: 3666 - DNA, 20 bp, Artificial Sequence
  Synthetic
ccctcgggtactcagactca

SEQ ID NO: 3667 - DNA, 20 bp, Artificial Sequence
  Synthetic
ccctcgggtactcagactca

SEQ ID NO: 3668 - DNA, 20 bp, Artificial Sequence
  Synthetic
ccctcgggtactcagactca

SEQ ID NO: 3669 - DNA, 20 bp, Artificial Sequence
  Synthetic
ccctcgggtactcagactca

SEQ ID NO: 3670 - DNA, 20 bp, Artificial Sequence
  Synthetic
ccctcgggtactcagactca

SEQ ID NO: 3671 - DNA, 20 bp, Artificial Sequence
  Synthetic
cttcccaccctaacctgctg

SEQ ID NO: 3672 - DNA, 20 bp, Artificial Sequence
  Synthetic
cttcccaccctaacctgctg

SEQ ID NO: 3673 - DNA, 20 bp, Artificial Sequence
  Synthetic
cttcccaccctaacctgctg

SEQ ID NO: 3674 - DNA, 20 bp, Artificial Sequence
  Synthetic
tacctccctccacttctggg

SEQ ID NO: 3675 - DNA, 20 bp, Artificial Sequence
  Synthetic
tacctccctccacttctggg

SEQ ID NO: 3676 - DNA, 20 bp, Artificial Sequence
  Synthetic
cgctcctccaggtgttcttt

SEQ ID NO: 3677 - DNA, 20 bp, Artificial Sequence
  Synthetic
cccatgttactgagccacgt

SEQ ID NO: 3678 - DNA, 20 bp, Artificial Sequence
  Synthetic
cccatgttactgagccacgt

SEQ ID NO: 3679 - DNA, 20 bp, Artificial Sequence
  Synthetic
cccatgttactgagccacgt

SEQ ID NO: 3680 - DNA, 20 bp, Artificial Sequence
  Synthetic
cccatgttactgagccacgt

SEQ ID NO: 3681 - DNA, 20 bp, Artificial Sequence
  Synthetic
cccatgttactgagccacgt

SEQ ID NO: 3682 - DNA, 20 bp, Artificial Sequence
  Synthetic
cccatgttactgagccacgt

SEQ ID NO: 3683 - DNA, 20 bp, Artificial Sequence
  Synthetic
tgaagacctgcagcttcctg

SEQ ID NO: 3684 - DNA, 20 bp, Artificial Sequence
  Synthetic
tgaagacctgcagcttcctg

SEQ ID NO: 3685 - DNA, 20 bp, Artificial Sequence
  Synthetic
tgaagacctgcagcttcctg

SEQ ID NO: 3686 - DNA, 20 bp, Artificial Sequence
  Synthetic
tgaagacctgcagcttcctg

SEQ ID NO: 3687 - DNA, 20 bp, Artificial Sequence
  Synthetic
tagggaatctgaggggtggg

SEQ ID NO: 3688 - DNA, 20 bp, Artificial Sequence
  Synthetic
tagggaatctgaggggtggg

SEQ ID NO: 3689 - DNA, 20 bp, Artificial Sequence
  Synthetic
cgagagaccatgagcccatc

SEQ ID NO: 3690 - DNA, 20 bp, Artificial Sequence
  Synthetic
cgagagaccatgagcccatc

SEQ ID NO: 3691 - DNA, 20 bp, Artificial Sequence
  Synthetic
cgagagaccatgagcccatc

SEQ ID NO: 3692 - DNA, 20 bp, Artificial Sequence
  Synthetic
tgatgctacttctgctggcc

SEQ ID NO: 3693 - DNA, 20 bp, Artificial Sequence
  Synthetic
tgatgctacttctgctggcc

SEQ ID NO: 3694 - DNA, 20 bp, Artificial Sequence
  Synthetic
tgatgctacttctgctggcc

SEQ ID NO: 3695 - DNA, 20 bp, Artificial Sequence
  Synthetic
acgtggctcagtaacatggg

SEQ ID NO: 3696 - DNA, 20 bp, Artificial Sequence
  Synthetic
acgtggctcagtaacatggg

SEQ ID NO: 3697 - DNA, 20 bp, Artificial Sequence
  Synthetic
gcaacccattagcccagact

SEQ ID NO: 3698 - DNA, 20 bp, Artificial Sequence
  Synthetic
ggaagctatacccaccaccg

SEQ ID NO: 3699 - DNA, 20 bp, Artificial Sequence
  Synthetic
cagcccagacatccacatgt

SEQ ID NO: 3700 - DNA, 20 bp, Artificial Sequence
  Synthetic
cagcccagacatccacatgt

SEQ ID NO: 3701 - DNA, 20 bp, Artificial Sequence
  Synthetic
cagcccagacatccacatgt

SEQ ID NO: 3702 - DNA, 20 bp, Artificial Sequence
  Synthetic
cagcccagacatccacatgt

SEQ ID NO: 3703 - DNA, 20 bp, Artificial Sequence
  Synthetic
cagcccagacatccacatgt

SEQ ID NO: 3704 - DNA, 20 bp, Artificial Sequence
  Synthetic
cagcccagacatccacatgt

SEQ ID NO: 3705 - DNA, 20 bp, Artificial Sequence
  Synthetic
cagcccagacatccacatgt

SEQ ID NO: 3706 - DNA, 20 bp, Artificial Sequence
  Synthetic
cagcccagacatccacatgt

SEQ ID NO: 3707 - DNA, 20 bp, Artificial Sequence
  Synthetic
caaggtgctgagagccaaga

SEQ ID NO: 3708 - DNA, 20 bp, Artificial Sequence
  Synthetic
gatgggctcatggtctctcg

SEQ ID NO: 3709 - DNA, 20 bp, Artificial Sequence
  Synthetic
gatgggctcatggtctctcg

SEQ ID NO: 3710 - DNA, 20 bp, Artificial Sequence
  Synthetic
gatgggctcatggtctctcg

SEQ ID NO: 3711 - DNA, 20 bp, Artificial Sequence
  Synthetic
gatgggctcatggtctctcg

SEQ ID NO: 3712 - DNA, 20 bp, Artificial Sequence
  Synthetic
gatgggctcatggtctctcg

SEQ ID NO: 3713 - DNA, 20 bp, Artificial Sequence
  Synthetic
gatgggctcatggtctctcg

SEQ ID NO: 3714 - DNA, 20 bp, Artificial Sequence
  Synthetic
tcaccagttctgtgggcatc

SEQ ID NO: 3715 - DNA, 20 bp, Artificial Sequence
  Synthetic
gccatgaggttcagctcact

SEQ ID NO: 3716 - DNA, 20 bp, Artificial Sequence
  Synthetic
gccatgaggttcagctcact

SEQ ID NO: 3717 - DNA, 20 bp, Artificial Sequence
  Synthetic
gccatgaggttcagctcact

SEQ ID NO: 3718 - DNA, 20 bp, Artificial Sequence
  Synthetic
agcagctggtccatttaccc

SEQ ID NO: 3719 - DNA, 20 bp, Artificial Sequence
  Synthetic
agcagctggtccatttaccc

SEQ ID NO: 3720 - DNA, 20 bp, Artificial Sequence
  Synthetic
agcagctggtccatttaccc

SEQ ID NO: 3721 - DNA, 20 bp, Artificial Sequence
  Synthetic
agcagctggtccatttaccc

SEQ ID NO: 3722 - DNA, 20 bp, Artificial Sequence
  Synthetic
agcagctggtccatttaccc

SEQ ID NO: 3723 - DNA, 20 bp, Artificial Sequence
  Synthetic
agcagctggtccatttaccc

SEQ ID NO: 3724 - DNA, 20 bp, Artificial Sequence
  Synthetic
agcagctggtccatttaccc

SEQ ID NO: 3725 - DNA, 20 bp, Artificial Sequence
  Synthetic
catgtggatgtctgggctgt

SEQ ID NO: 3726 - DNA, 20 bp, Artificial Sequence
  Synthetic
catgtggatgtctgggctgt

SEQ ID NO: 3727 - DNA, 20 bp, Artificial Sequence
  Synthetic
catgtggatgtctgggctgt

SEQ ID NO: 3728 - DNA, 20 bp, Artificial Sequence
  Synthetic
catgtggatgtctgggctgt

SEQ ID NO: 3729 - DNA, 20 bp, Artificial Sequence
  Synthetic
catgtggatgtctgggctgt

SEQ ID NO: 3730 - DNA, 20 bp, Artificial Sequence
  Synthetic
ctctgtactcagggtgctgc

SEQ ID NO: 3731 - DNA, 20 bp, Artificial Sequence
  Synthetic
ctctgtactcagggtgctgc

SEQ ID NO: 3732 - DNA, 20 bp, Artificial Sequence
  Synthetic
ctctgtactcagggtgctgc

SEQ ID NO: 3733 - DNA, 20 bp, Artificial Sequence
  Synthetic
ctctgtactcagggtgctgc

SEQ ID NO: 3734 - DNA, 20 bp, Artificial Sequence
  Synthetic
ctctgtactcagggtgctgc

SEQ ID NO: 3735 - DNA, 20 bp, Artificial Sequence
  Synthetic
gggtaaatggaccagctgct

SEQ ID NO: 3736 - DNA, 20 bp, Artificial Sequence
  Synthetic
gggtaaatggaccagctgct

SEQ ID NO: 3737 - DNA, 20 bp, Artificial Sequence
  Synthetic
gggtaaatggaccagctgct

SEQ ID NO: 3738 - DNA, 20 bp, Artificial Sequence
  Synthetic
gggtaaatggaccagctgct

SEQ ID NO: 3739 - DNA, 20 bp, Artificial Sequence
  Synthetic
tgttgaggctggtctcgaac

SEQ ID NO: 3740 - DNA, 20 bp, Artificial Sequence
  Synthetic
tgttgaggctggtctcgaac

SEQ ID NO: 3741 - DNA, 20 bp, Artificial Sequence
  Synthetic
tgttgaggctggtctcgaac

SEQ ID NO: 3742 - DNA, 20 bp, Artificial Sequence
  Synthetic
tgttgaggctggtctcgaac

SEQ ID NO: 3743 - DNA, 20 bp, Artificial Sequence
  Synthetic
caggtgattttgcccaaccg

SEQ ID NO: 3744 - DNA, 20 bp, Artificial Sequence
  Synthetic
caggtgattttgcccaaccg

SEQ ID NO: 3745 - DNA, 20 bp, Artificial Sequence
  Synthetic
cagtgccagcaagactagct

SEQ ID NO: 3746 - DNA, 20 bp, Artificial Sequence
  Synthetic
cagtgccagcaagactagct

SEQ ID NO: 3747 - DNA, 20 bp, Artificial Sequence
  Synthetic
attgttccgtgggtggagtc

SEQ ID NO: 3748 - DNA, 20 bp, Artificial Sequence
  Synthetic
attgttccgtgggtggagtc

SEQ ID NO: 3749 - DNA, 20 bp, Artificial Sequence
  Synthetic
cccactcaccatggacaaca

SEQ ID NO: 3750 - DNA, 20 bp, Artificial Sequence
  Synthetic
cccactcaccatggacaaca

SEQ ID NO: 3751 - DNA, 20 bp, Artificial Sequence
  Synthetic
cccactcaccatggacaaca

SEQ ID NO: 3752 - DNA, 20 bp, Artificial Sequence
  Synthetic
cccactcaccatggacaaca

SEQ ID NO: 3753 - DNA, 20 bp, Artificial Sequence
  Synthetic
ggggagtggctaatgtgacc

SEQ ID NO: 3754 - DNA, 87 bp, Artificial Sequence
  Synthetic
gtttcagagctatgctggaaacagcatagcaagttgaaataaggctagtccgttatcaacttgaaaaagtggcaccgagtcggtgct

SEQ ID NO: 3755 - DNA, 86 bp, Artificial Sequence
  Synthetic
gtttaagtactctgtgctggaaacagcacagaatctacttaaacaaggcaaaatgccgtgtttatctcgtcaacttgttggcgaga

SEQ ID NO: 3756 - DNA, 4176 bp, Artificial Sequence
  Synthetic
atgggccccgccgccaagagagtgaagctggacggatccgacaagaagtactccattgggctggacattggcactaactccgtgggatgggccgtgatcaccgacgagtacaaagtgcccagcaagaagtttaaagtgctggggaatactgaccggcacagcatcaagaagaaccttataggcgccctcctgtttgattccggagaaaccgctgaagccacccggctcaagagaaccgccagacgccgctacacccggaggaagaatcgcatctgctatctgcaagagatcttctccaacgaaatggccaaggtggacgactcgttcttccatcggctggaggagtcctttctggtggaagaagataagaagcatgagagacaccccatcttcggcaacatcgtggatgaagtggcctaccacgaaaagtaccctaccatctaccaccttcgcaagaagctcgtggatagcactgataaggcggacctccgcctgatctacctcgcgctcgcccatatgatcaagttccggggacacttcctgatcgagggggacctgaaccctgacaacagcgacgtggataagctgttcatccaactggtgcaaacctataaccagctgttcgaggagaaccctatcaacgcctccggagtggacgccaaggccatcctgtcggctcgcctgtccaagtcgagaaggctggaaaacctgattgcccagctcccgggagaaaagaagaacggcctgttcggcaacctgatcgctctctccctgggcctgaccccgaatttcaagagcaacttcgacctcgccgaagatgcaaagctccagctgtcaaaagacacctacgacgatgacctggacaatctgctggcacagatcggggatcagtacgctgacctgttcctggccgccaagaacctgtccgacgcgatcctgctctcggatattctgagggtcaacaccgagattaccaaggcccctctgtccgcgagcatgatcaagcggtacgatgaacatcaccaggatctgacactcttgaaggcccttgtccgccaacaactgccggagaagtacaaggagattttctttgatcagtccaagaacggctacgctggctacattgacgggggtgccagccaggaagaattttacaagttcattaagcctattctcgaaaagatggacggaactgaggagttgctcgtgaagctgaaccgggaggacctgttgagaaagcaacgcaccttcgacaacggttcgattcctcatcaaattcatctgggtgaactgcacgccatcctccggcggcaggaggatttctatccattcctgaaagacaaccgagagaagattgagaaaatcctgaccttccggataccctactacgtgggaccattggctcgggggaacagcagattcgcgtggatgactagaaagtccgaggagactattaccccgtggaacttcgaggaggtggtcgataagggcgcatcggcacagtccttcatcgagcggatgaccaacttcgacaagaaccttcccaacgaaaaggtgctgcccaagcactcgctgttgtacgagtactttaccgtgtacaacgagctcactaaagtgaaatacgtgaccgagggaatgagaaagccggcctttctgtccggggaacagaagaaggccatcgtggacctcctcttcaaaaccaacagaaaagtcaccgtgaagcagctgaaggaggactacttcaagaaaatcgagtgcttcgactcggtcgagatttcgggggtcgaggataggtttaatgccagcctgggtacttaccacgatctgctgaagatcattaaggacaaggacttccttgacaacgaagaaaacgaggacatccttgaggacattgtcctgaccctgaccctgtttgaggatcgggagatgattgaggaaagacttaagacctacgctcatttgttcgacgacaaggtcatgaaacagctgaagcggaggcggtacactggatggggtcggctgtccaggaagctgatcaacggaatccgggacaagcaatccggaaagaccatcctggacttcctgaagtcagacgggttcgccaaccggaacttcatgcagctcattcacgacgacagcctgacgttcaaggaggacatccagaaggcacaagtgtcgggacagggagacagcctccacgaacacattgcgaacctcgcgggttcaccggctatcaagaagggaatcctgcagactgtgaaggtggtggacgagttggtcaaggtcatgggcaggcataagcctgaaaacatcgtgatcgagatggcccgggagaaccagaccacccagaaggggcagaagaacagcagagagcgcatgaagcgcattgaggagggcatcaaggaactgggatcacagatcctgaaggaacatcccgtggaaaacacgcagctgcagaacgagaaactctacctgtactatttgcaaaacggccgcgatatgtacgtggaccaagaactcgatatcaaccgcctgtccgactacgacgtggaccacatcgtgccgcagagcttcctgaaggatgattctatcgataacaaggtcctcacccggtcggacaagaatcgggggaagtcagataacgtgccgtctgaggaagtggtgaagaagatgaagaattactggcggcagcttctgaacgcgaaacttattacccagcggaaattcgacaacctgactaaggccgagcggggaggactgtcagaactggacaaagccggcttcattaagagacagctggtcgaaactcgccagatcaccaaacatgtggcccagatcctggactccaggatgaacaccaagtacgacgaaaacgataagctcattcgggaagtgaaagtgatcacactgaagtccaagctggtgtccgacttccgcaaggacttccagttctacaaggtccgcgagattaacaactaccaccacgcacacgacgcttacttgaacgccgtcgtgggcactgccttgattaagaaatacccgaagctggaatccgagttcgtgtacggagactacaaggtgtacgatgtgcgcaagatgatcgccaagtcggagcaagaaatcggaaaggccaccgctaagtatttcttttactccaacattatgaacttcttcaagactgagatcaccctggccaatggagaaatccgcaagaggccgctgatcgaaaccaatggagagactggagagattgtgtgggataagggacgcgacttcgccaccgtgcgcaaggtgctgagcatgccccaagtcaacattgtgaaaaagaccgaagtgcagacgggcggtttctcaaaggaaagcatcctgcctaagcggaactccgataagctgatcgcgcgcaagaaggactgggacccgaagaaatatggcggcttcgactcccccaccgtcgcctactcggtgctcgtcgtggctaaagtggagaagggaaagtcgaagaagctcaagtccgtgaaggaattgctgggtattactattatggaacggtccagcttcgagaagaatccgatcgacttcctggaggccaagggatacaaggaagtgaagaaggacctgatcattaagctgccgaagtacagcctttttgagctggaaaacggacgcaagcggatgctggcctccgccggagagctgcagaagggcaacgaactggccctcccgtccaaatacgtgaactttctgtacctggccagccactacgagaagctgaagggatcacctgaagataacgagcagaagcagctgttcgtggaacaacataagcattatcttgacgagatcattgaacagatctctgagttctccaagagagtgattctggctgacgctaaccttgacaaagtgctgagcgcttacaacaagcacagggacaagcccatccgggagcaggcagagaacatcattcacctgttcactctcaccaacttgggtgccccggcagccttcaagtacttcgataccacaatcgaccgcaagaggtacacctcaaccaaggaggtccttgacgctaccctgatccatcaatccattaccggcctgtacgaaactaggatcgacctgtcgcagctgggtggcgacaagcttcctgccgccaagagagtgaagctggactaa

SEQ ID NO: 3757 - DNA, 3231 bp, Artificial Sequence
  Synthetic
atgcctgccgccaagagagtgaagctggacggatccggaaagcggaactatatcctgggactggacatcggaattacctccgtgggatacggcatcatcgattacgagactagggacgtgattgacgccggcgtgagactctttaaggaggccaacgtggaaaacaacgaaggtcgcagatccaagcggggtgcaagacgcctgaagcgccggaggagacatcggatacagcgcgtgaagaagctccttttcgactacaacctcctcactgaccactcggaattgtccggtatcaacccctacgaagcccgcgtgaaaggcctgagccagaagctgtccgaagaggagtttagcgcagccctgctgcacctggctaagcgaaggggggtgcacaacgtgaacgaggtggaggaggacactggcaacgaactgtccaccaaggagcagatttcacggaactcgaaggcgctggaagagaaatatgtggccgagctgcagctggagaggctcaagaaggatggcgaagtccgggggagcatcaatcgcttcaagacctcggactacgtgaaggaagccaaacagctgttgaaggtgcagaaggcctaccaccaactggaccaatcattcattgacacttacatcgatctgcttgaaaccaggcgcacctactacgagggtcctggagaaggcagccctttcggatggaaggacatcaaggagtggtatgagatgctgatgggtcattgcacctactttccggaagaactgcgctcagtgaagtacgcgtacaacgctgacctctacaacgctctcaacgatctgaacaacctcgtgatcacccgggacgagaacgaaaagctggagtactacgaaaagttccagattatcgaaaacgtgttcaagcagaagaagaagcccaccctgaagcagattgcaaaggagatccttgtgaacgaggaggatattaagggctaccgggtcacctccaccgggaaaccagagttcactaatctcaaggtgtaccatgacattaaggacattactgcccgcaaggagatcattgaaaacgcggaactgctggaccaaatcgcgaagatcctgaccatctatcagagctccgaggatatccaggaggaacttactaacctcaattccgagctgacgcaggaagaaatcgagcaaattagcaacctgaagggttacactggaacccacaacctcagcttgaaagcgattaaccttattttggatgaactttggcacactaatgacaatcagatcgccattttcaaccggctgaaactggtgccgaagaaggtggacctgagccaacagaaggaaatcccgaccacccttgtggacgatttcatcctgtcacctgtggtgaagaggagcttcatccagtcgatcaaggtcatcaacgccatcataaagaagtacggccttcccaacgacatcatcatcgaactggcccgcgagaagaactccaaagatgcccagaagatgatcaacgagatgcagaagcgaaaccggcagacgaacgaacggatcgaggagatcatccggaccaccgggaaggaaaacgcgaagtacctgatcgagaaaatcaagctgcatgatatgcaggaagggaagtgtctctactccctggaggccattccgctggaggatttgctgaacaaccctttcaactacgaagtcgatcatatcattcctcgctccgtgtccttcgataactccttcaacaataaggtcctcgtgaagcaggaggagaactcgaagaagggcaacagaaccccgttccagtacctctcgtcgtccgactccaagatcagctacgaaactttcaagaagcacattctgaacctggccaagggcaaagggagaattagcaagaccaagaaggaatacctcctggaagagagagacatcaaccgcttctcggtgcaaaaggatttcatcaaccgcaacctggtcgataccagatacgccaccaggggactgatgaacctcctgcggtcctacttccgggtcaacaatctggacgtgaaggtcaaatccatcaacgggggctttacttctttcctgcgccggaagtggaagttcaagaaggaacggaacaagggatacaagcaccacgctgaagatgccctgattattgccaacgccgacttcatctttaaggaatggaaaaagctggacaaggctaagaaggtcatggagaaccagatgttcgaagaaaagcaggccgagtccatgcccgaaatcgaaaccgagcaggaatacaaggagatcttcatcacaccgcaccaaatcaagcacatcaaggacttcaaggattacaagtacagccaccgggtggacaagaagcctaacagagagcttatcaacgacaccctgtactccacgcgcaaggacgacaagggaaacacattgatcgtgaacaacctgaacggactgtatgacaaggacaatgacaaactgaagaagctgatcaacaaatcgccggaaaagctcctgatgtaccatcacgaccctcaaacctaccagaaactgaagctcatcatggagcagtacggcgacgaaaagaatcccctgtacaaatactacgaggagactggaaattacctgactaagtactccaagaaggataacggccccgtgatcaagaagattaagtactacggaaacaaactgaacgcacatctcgacatcaccgatgattatccaaactcccgcaacaaagtcgtgaagctctccctcaaaccgtaccgcttcgacgtgtacctggataatggggtgtacaagttcgtgaccgtgaagaacctggacgtcattaagaaggaaaactactacgaagtgaactcaaagtgctacgaggaagccaagaagctcaagaagatcagcaaccaggccgagttcatcgcatcgttttacaacaatgacctcattaagattaatggagaactgtacagagtgatcggcgtgaacaacgacctcctgaaccggattgaagtgaacatgatcgatattacctaccgggagtatctggagaacatgaacgacaagcgcccaccgagaatcatcaaaactattgcctccaagacccaatccattaagaaatactccaccgacatcctgggcaacctgtacgaggtcaagtcgaagaagcacccccagattatcaagaagggaaagcttcctgccgccaagagagtgaagctggactaa

SEQ ID NO: 3758 - DNA, 280 bp, Artificial Sequence
  Synthetic
gaattcgtggtgagcgtctgggcatgtctgggcatgtctgggcatgtctgggcatgtcgggcattctgggcgtctgggcatgtctgggcatgtctgggcatctcgagactcacggggatttccaagtctccaccccattgacgtcaatgggagtttgttttggcaccaaaatcaacgggactttccaaaatgtcgtaataaccccgccccgttgacgcaaatgggcggtaggcgtgtacggtgggaggtctatataagcagagctcgtttagtgaaccgt

SEQ ID NO: 3759 - DNA, 595 bp, Artificial Sequence
  Synthetic
ggtgtggaaagtccccaggctccccagcaggcagaagtatgcaaagcatgcatctcaattagtcagcaaccacgttacataacttacggtaaatggcccgcctggctgaccgcccaacgacccccgcccattgacgtcaataatgacgtatgttcccatagtaacgccaatagggactttccattgacgtcaatgggtggagtatttacggtaaactgcccacttggcagtacatcaagtgtatcatatgccaagtacgccccctattgacgtcaatgacggtaaatggcccgcctggcattatgcccagtacatgaccttatgggactttcctacttggcagtacatctacgtattagtcatcgctattaccatggtgatgcggttttggcagtacatcaatgggcgtggatagcggtttgactcacggggatttccaagtctccaccccattgacgtcaatgggagtttgttttggcaccaaaatcaacgggactttccaaaatgtcgtaacaactccgccccattgacgcaaatgggcggtaggcgtgtacggtgggaggtctatataagcagagctcgtttagtgaaccgt

SEQ ID NO: 3760 - DNA, 250 bp, Artificial Sequence
  Synthetic
gagggcctatttcccatgattccttcatatttgcatatacgatacaaggctgttagagagataattggaattaatttgactgtaaacacaaagatattagtacaaaatacgtgacgtagaaagtaataatttcttgggtagtttgcagttttaaaattatgttttaaaatggactatcatatgcttaccgtaacttgaaagtatttcgatttcttggctttatatatcttgtggaaaggacgaaacaccg
